(19) United States
(12) Patent Application Publication
(10) Pub. No.: US 2020/0010842 A1
(43) Pub. Date: Jan. 9, 2020

(54) PLANT WITH INCREASED SILICON UPTAKE

(71) Applicant: UNIVERSITE LAVAL, Quebec (CA)

(72) Inventors: Richard BELANGER, Quebec (CA); Rupesh DESHMUKH, Quebec (CA); Francois BELZILE, Quebec (CA); Caroline LABBE, Levis (CA)

(21) Appl. No.: 15/574,414

(22) PCT Filed: May 19, 2016
(86) PCT No.: PCT/CA2016/050568

§ 371 Date: Nov. 15, 2017

Related U.S. Application Data
(60) Provisional application No. 62/164,031, filed on May 20, 2015.

(51) Int. Cl. C12N 15/82; C12Q 1/6895

(52) U.S. Cl. CPC C12N 15/8243; C12Q 1/6895; C12Q 2600/172; C12Q 2600/156; C12Q 2600/13

(57) ABSTRACT

The invention relates to nucleic acid sequences defining a genomic region conferring high silicon (Si) accumulation as discovered in the soybean (Glycine max) cultivar Hikmok sorip. Plants having this region, named HiSil, introduced in its nucleic acid exhibit increased Si uptake. Furthermore, markers associated with high Si accumulation and 5 methods of identifying high Si accumulating plants using the markers are provided. The method provided by the invention can be used to develop new plants with high Si accumulation capacity, through breeding, genetic modification or any other forms of plant propagation.

### FIELD OF THE INVENTION

[0001] The present invention relates to chromosomal intervals, marker loci, and genes that are associated with and/or confer high silicon accumulation in soybean. More specifically, the present invention relates to silicon accumulation and its benefits achieved in plants in which these chromosomal intervals, loci, and genes are introduced (by breeding, grafting or genetic engineering), thus achieving high silicon uptake. The present invention also relates to markers that may be used identify and/or select plants containing these chromosomal intervals, loci, and genes for silicon accumulation and its applications.

### BACKGROUND OF THE INVENTION

[0002] Silicon (Si) is one of the most abundant elements on the earth's surface and it comprises 50-70% of soil mass (Epstein, 1994). Si absorption in plants plays an important role in alleviating both biotic and abiotic stress tolerance. Many studies have reported Si as beneficial element and its accumulation has been corroborated with enhanced plant vigor and growth. More particularly, Si fertilization has been found to be effective against powdery mildew diseases in several crop plants including wheat, barley, rose, cucumber, muskmelon, zucchini squash, grape, and dandelion (Bowen et al., 1992; Menzies et al., 1992; Fawe et al., 2001; Belanger et al., 2003; Rodrigues et al., 2003). Si was also found to be beneficial to manage other diseases such as blast (Pyricularia grisea) and brown spot (Bipolaris oryzae) on rice, and soybean rust and Phytophthora stem and root rot on soybean (Rodrigues et al., 2003, Arsenault-Labrecque et al., 2012, Guerin et al, 2014). Si plays similar roles to alleviate abiotic stresses like salinity, heavy metals, drought tolerance and stress of extreme temperature regimes (Tuna et al., 2008, Gu et al., 2011, Chen et al., 2011, XiaoYu et al., 2013). A recent review by Epstein (2009) concluded that the beneficial role of Si is very prominent under stress whereas under normal growth conditions its role is often minimal or even nonexistent. Therefore, Si is not considered a primary essential nutrient, but rather a ‘quasi-essential’ element providing protection under stress.

[0003] Si gets absorbed in plants by the root system in the form of silicic acid and is eventually deposited as polymerized Si in its shoots and leaves (Sangster et al., 2001). Si absorption and accumulation in leaf is not uniform across plant species. In general, monocots such as rice, sugarcane and most cereals absorb large quantities of Si (up to 10% dry weight) and derive positive benefits from Si feeding (Ma and Yamaji, 2006). On the other hand, many dicots appear to be impervious to the element and gain minimal benefits from Si supplements (Hodson et al., 2005). This difference in Si accumulation has been attributed to the ability of the roots to take up Si, This would explain why experiments with Si feeding and reported benefits have yielded irregular results depending on whether the plant tested was a high or low accumulator. Therefore application of Si as a fertilizer has limitations related to whether the plant species is capable of uptake, or not.

[0004] In monocots like rice, Si influx in roots has been found to be controlled by an aquaporin termed Lsi1 (Ma et al, 2006). Later on, the molecular mechanisms involved in Si uptake were better defined with the finding of another gene, Lsi2, encoding for the efflux transport of Si (Ma et al., 2007). Both genes Lsi1 and Lsi2 were discovered using mutant resources and no natural variant has been reported yet. Si uptake and accumulation mechanisms in plants have been further validated in other monocot species such as sorghum and maize (Mitani et al., 2009). However, as with rice, natural variation appears to be lacking in sorghum and maize.

[0005] Si accumulation in dicots is less understood compared to monocots. Efforts have been made to demonstrate that Si uptake capability of dicots can be improved through transgenic approaches. Arabidopsis, a species that does not carry Lsi1 transporters, when transformed with Lsi1 genes from wheat and rice showed a 4-5 fold increase in Si accumulation (Montpetit et at., 2012). A similar approach was attempted in soybean, whereby soybean plants transformed with Lsi1 from wheat or horsetail were tested for improved Si accumulation (Guérin, 2014). However, transformed plants absorbed similar amounts as controls, a result explained by the recently identified genes GmNIP2-1 and GmNIP2-2 facilitating Si influx in soybean (Deshmukh et al., 2013). This leads to the conclusion that soybean already carries a functional Si influx transporter (Lsi1) and introgression of additional transporters (natural or transgenic) will not increase Si uptake. As a matter of fact, DNA sequences and expression of both Lsi1 genes in soybean have been found to be similar across different genotypes, thereby suggesting a lack of natural variation for Si influx transporter genes. Therefore, the possibility to breed novel varieties using these Si influx transporters is improbable.

[0006] However, there is evidence that some soybean genotypes absorb more Si than others and can thus better resist stresses such as the ones imposed by diseases under Si fertilization (Arsenault-Labrecque et al., 2012: Guérin et al., 2014). At this point, the mechanisms or genes that could confer such a property are unknown. Accordingly, identification of natural soybean variants for Si uptake capability and the mechanisms/genes responsible for the variation could definitely represent a valuable resource for soybean improvement.

### SUMMARY OF THE INVENTION

[0007] Compositions and methods for identifying, selecting and/or producing soybean plants with increased silicon accumulation and/or uptake are provided. As described herein, a marker associated with the HiSil trait may comprise, consist essentially of, or consist of: a single allele or a combination of alleles at one or more genetic loci (e.g. see Tables 15-21).

[0008] In a first aspect of the invention, there is provided a plant having introduced into its genome a nucleic acid sequence encoding a HiSil protein wherein introduction into its genome confers increased Si accumulation in the plant as compared to a control plant (i.e. LoSil plant) not comprising the nucleic acid sequence encoding a HiSil protein.

[0009] In a further aspect of the invention, there is provided a plant (e.g. elite Glycine max) which comprises in its genome a chromosomal interval comprising a H1 haplotype associated with Si accumulation.

[0010] In a further aspect of the invention, there is provided a plant which comprises in its genome a chromosomal interval associated with Si accumulation corresponding to a genomic region or portion thereof from Hikmok sorip chromosome 16 at about 92.6 cM to about 132 cM distance as indicated on a genetic linkage map from Hikmok sorip (PI372415A).

[0011] In a further aspect of the invention, there is provided a plant which comprises in its genome a chromosomal interval associated with Si accumulation corresponding to a genomic region or portion thereof from Hikmok sorip chromosome 16 corresponding to physical positions 31.15 M base-pairs to 36.72 M base-pairs. Particularly, the numbering of base pairs corresponds to the Willaims82 genomic map (i.e. Soybean genome assembly from JGI release 8. Based on the original Glyma v1.(January 2012), Herein, “Williams82 map”).

[0012] In a further aspect of the invention, there is provided a plant having introduced into its genome a chromosomal interval associated with Si accumulation of a H1 haplotype soybean plant. Particularly, a H1 haplotype derived from Hikmok sorip and wherein the plant is an elite Glycine max plant and in another embodiment wherein the chromosome interval comprises at least one molecular marker as displayed in Tables 15-21.

[0013] In a further aspect of the invention, there is provided a plant having introduced into its genome a chromosomal interval associated with Si accumulation corresponding to a genomic region or portion thereof from Hikmok sorip chromosome 16 at about 92.6 cM to about 132 cM distance as indicated on a genetic linkage map from Hikmok sorip (P1372415A). Another embodiment the chromosomal interval comprises at least one molecular marker as displayed in Tables 15-21.

[0014] In a further aspect of the invention, there is provided a plant having introduced into its genome a chromosomal interval associated with Si accumulation corresponding to a genomic region or portion thereof from Hikmok sorip chromosome 16 from physical positions 31.15M base-pairs to 36.72 M base-pairs corresponding to the Williams82 map.

[0015] In a further aspect, there is provided a plant which comprises in its genome a chromosomal interval associated with Si accumulation corresponding to a genomic region or portion thereof from Hikmok sorip chromosome 16 at about 92.6 cM to about 132 cM distance or from physical positions 33.15M base-pairs to 36.72M base-pairs as indicated on a genetic linkage map from Hikmok sorip (P1372415A).

[0016] In a further aspect, there is provided a plant having introduced into its genome a chromosomal interval associated with Si accumulation corresponding to a genomic region or portion thereof from Hikmok sorip chromosome 16 at about 92.6 cM to about 132 cM distance or from physical positions 33.15M base-pairs to 36.72M base-pairs as indicated on a genetic linkage map from Hikmok sorip (PI372415A).

[0017] In a further aspect, there is provided a plant wherein said plant comprises a HiSil trait. Further is provided a plant comprising a HiSil trait derived from Hikmok sorip or a progeny thereof.

[0018] In a further aspect, there is provided a plant comprising a HiSil allele which confers increased Si uptake, and wherein the HiSil allele comprises at least one single nucleotide polymorphism (SNP) selected from the group consisting of A(33673022), G(33673483), C(33681630), T(33682500), G(33683047), and C(33683049) as indicated on a genetic linkage map from Hikmok sorip (P1372415A).

[0019] In accordance with a particular aspect of the invention, there is provided a plant as defined herein, wherein the presence/introduction of the nucleic acid confers increased resistance to at least one pathogen from the group consisting of: nematode, rust, smut, Golovinomyces cichoracearum, Eiysiphe cichoracearum, Blumeria graminis, Podosphaera xanthil, Sphaerotheca fuliginea, Pythium ultimum, Uncinula necator, Mycosphaerella pinodes, Magnaporthe grisea, Bipolans oryzae, Magnaporthe grisea, Rhizoctonia solani, Phytophthora sojae. Schizaphis graminum, Bemisia tabaci, Rhopalosiphum maidis, Deroceras reticuiaturn, Diatraea saccharalis, Schizaphis graminum and Myzus persicae; or a combination thereof.

[0020] In accordance with a particular aspect of the invention, there is provided a plant having increased resistance to a stress selected from the group consisting of: diseases (such as powdery mildew, Pythium ultimum, Phytophthora root rot, leaf spot, blast, brown spot, root-knot nematode, soybean cyst nematode, soybean vein necrosis virus, soybean stem canker, soybean sudden death syndrome, leaf and neck blast, rust, frogeye leaf spot, brown stem rot, Fusarium, or sheath blight); insect pests (such as whitefly, aphid, grey field slug, sugarcane borer, green bug, or aphid); abiotic stress (such as drought tolerance, flooding, high level of salinity, heavy metal, aluminum, manganese, cadmium, zinc, UV-B, boron, iron deficiency chlorosis or cold tolerance (i.e. extreme temperatures)).

[0021] In a further aspect, there is also provided the plant as defined herein having improved agronomical traits such as seedling vigor, yield potential, phosphate uptake, plant growth, seedling growth, phosphorus uptake, lodging, reproductive growth, or grain quality.

[0022] In accordance with a further aspect, there is provided a disease-resistant plant, comprising an introgression from a Hikmok sorip accession P1372415A or progeny thereof, wherein the introgression comprises a Si uptake conferring QTL linked to at least one marker located on the chromosome equivalent to linkage group J (Chromosome 16), and wherein said marker is located within a chromosome interval corresponding to about 95 cM to about 102 cM distance or from physical positions 33104446 bp to 35762786 bp, or a portion thereof, on a genetic linkage map from Hikmok sorip (P1372415A). In another embodiment said introgression is from any one of: PI209332, PI404166, PI437655, PI89772, PI372415A, PI90763, or a progeny thereof.

[0023] In accordance with a further aspect, there is provided a plant that can uptake and accumulate Si into its leaf or stem tissue at an increased rate as compared to a LoSil or control plant grown under hydroponic conditions.

[0024] In accordance with a further aspect, there is provided a plant comprising a HiSil allele which confers increased Si uptake, and wherein the HiSil allele comprises at least one single nucleotide polymorphism (SNP) selected from the group consisting of: G(33672717), A(33673022), G(33673483), C(33681630), T(33681946), T(33681961), T(33682500), G (33683047), and C (33683049) corresponding to a chromosomal interval from Hikmok sorip chromosome 16 at about 95 cM to about 102 cM distance or from physical positions 33104446 base-pairs to 3576286 base-pairs as indicated on a genetic linkage map from Hikmok sorip (P1372415A).

[0025] In a further aspect, there is provided a plant cell, plant seed or plant part derived from the HiSil Glycine max plant. There is also provided a progeny plant derived from the HiSil Glycine max plant.

[0026] Particularly, with reference to the plants as defined herein, the plant is a crop plant. More particularly, the crop plant is a soybean or Glycine max plant. Most particularly, the Glycine max plant is an elite Glycine max plant.

[0027] In a further aspect, there is provided a method for producing a Glycine max plant having a HiSil trait, the method comprising the steps of: a) providing a first Glycine max plant line, or progeny thereof comprising an H1 haplotype; b) crossing the Glycine max plant provided in step a) with a second Glycine max plant; c) collecting the seeds resulting from the cross in step b); d) regenerating the seeds of c) into plants; e) providing one or more backcross generations by crossing the plants of step d) or selfed offspring thereof with Glycine max breeding material to provide backcross plants; f) selfing plants of step e) and growing the selfed seed into plants; g) evaluating the plants of step f) for high silicon uptake (i.e. HiSil trait); and h) identifying and selecting plants that are high accumulators of Si wherein the identifying is performed by genotyping the plant for a marker that associates with the HiSil trait (e.g. a marker within 20 cM, 10 cM, 5 cM or less from the a chromosomal interval corresponding to about 95 cM to about 102 cM distance or from physical positions 33104446 bp to 35762786 bp, or a portion thereof, on a genetic linkage map from Hikmok sorip (P1372415A).

[0028] In accordance with a particular aspect of the invention, there is provided a method for producing a Glycine max plant having the HiSil trait, the method comprising the steps of: a) providing any one of the following Glycine max plant lines, or progeny thereof, selected from the group consisting of PI372415A, P1209332, P1404166, P1437655, P189772, P1372415A or P190763; b) crossing the Glycine max plant provided in step a) with a second Glycine max plant; c) collecting the seeds resulting from the cross in step b); regenerating the seeds of c) into plants; d) providing one or more backcross generations by crossing the plants of step c) or selfed offspring thereof with Glycine max breeding material to provide backcross plants; e) selfing plants of step d) and growing the selfed seed into plants; f) evaluating the plants of step e) for high silicon uptake (i.e. HiSII trait); and g) identifying and selecting plants that are high accumulators of Si wherein the identifying is performed by genotyping the plant for a marker that associates with the HiSil trait (e.g. a marker within 20 cM, 10 cM, 5 cM or less from the a chromosomal interval corresponding to about 95 cM to about 102 cM distance or from physical positions 33104446 bp to 35762786 bp, or a portion thereof, on a genetic linkage map from Hikmok sorip (P1372415A).

[0029] In accordance with a particular aspect of the invention, there is provided a method for producing seeds that result in Glycine max plants having a HiSil trait, the method comprising the steps of: a) providing a first Glycine max plant line, or progeny thereof comprising an H1 haplotype; b) crossing the Glycine max plant provided in step a) with a second Glycine max plant; c) collecting the seeds resulting from the cross in step b); d) regenerating the seeds of c) into plants; e) providing one or more backcross generations by crossing the plants of step d) or selfed offspring thereof with Glycine max breeding material to provide backcross plants; f) selfing plants of step e) and growing the selfed seed into plants; and g) selecting and identifying seeds that result in Glycine max plants that are high accumulators of Si wherein the identifying is performed by genotyping the plant for a marker that associates with the HiSil trait (e.g, a marker within 20 cM, 10 cM, 5 cM or less from the a chromosomal interval corresponding to about 95 cM to about 102 cM distance or from physical positions 33104446 bp to 35762786 bp, or a portion thereof, on a genetic linkage map from Hikmok sorip (P1372415A).

[0030] In accordance with a further aspect, the invention provides a method for producing seeds that result in Glycine max plants having the HiSil trait, the method comprising the steps of: providing any one of the following Glycine max plant lines, or progeny thereof, selected from the group consisting of PI372415A, PI209332, PI404166, PI437655, PI89772, PI372415A or PI90763; crossing the Glycine max plant provided in step a) with a second Glycine max plant; collecting the seeds resulting from the cross in step b); regenerating the seeds of c) into plants; providing one or more backcross generations by crossing the plants of step d) or selfed offspring thereof with Glycine max breeding material to provide backcross plants; selfing plants of step e) and growing the selfed seed into plants; and selecting and identifying seeds that result in Glycine max plants that are high accumulators of Si wherein the identifying is performed by genotyping the plant for a marker that associates with the HiSil trait (e.g. a marker within 20 cM, 10 cM, 5 cM or less from the a chromosomal interval corresponding to about 95 cM to about 102 cM distance or from physical positions 33104446 bp to 35762786 bp, or a portion thereof, on a genetic linkage map from Hikmok sorip (PI372415A).

[0031] In accordance with a particular aspect of the invention, there is provided a method of producing a soybean plant having increased Si uptake, the method comprising the steps of: a) crossing a first Glycine max plant having high Si uptake with a second Glycine max plant having low Si uptake, wherein said first Glycine max plant comprises in its genome a chromosomal interval comprising a H1 haplotype; and b) producing a progeny plant from the plant cross of a), wherein said progeny plant comprises in it genome a chromosomal interval comprising a H1 haplotype; thereby producing a soybean plant having increased Si uptake.

[0032] In accordance with a particular aspect of the invention, there is provided a method of controlling any one of the following diseases in a crop: Asian soybean rust, soy cyst nematode, nematode, rust, smut, Golovinomyces cichoracearum, Erysiphe cichoracearum, Blumeria graminis, Podosphaera xanthii, Sphaerotheca fuliginea, Pythium ultimum, Uncinula necator, Mycosphaerella pinodes, Magnaporthe grisea, Bipolaris oryzae, Magnaporthe grisea, Rhizoctonia solani, Phytophthora sojae, Schizaphis graminum, Bemisia tabaci, Rhopalosiphum maidis, Deroceras reticulatum, Diatraea saccharalis, Schizaphis graminum and Myzus persicae, the method comprising the steps of: a) planting in a field a soybean HiSil plant as described herein; and b) ensuring that said plant is provided with a supply of Si at a concentration of at least about 0.8 mM,

[0033] In accordance with a particular aspect of the invention, there is provided a method of reducing abiotic stress damage in a crop wherein the abiotic stress is caused by any one of the following: drought, flooding/excess water, high level of salinity, heavy metal, aluminum, manganese, cadmium, zinc, UV-B, boron, cold temperature, heat, or herbicide, the method comprising the steps of: a) planting in a field a soybean HiSil plant as described herein; and b) ensuring that said plant is provided with a supply of Si at a concentration of at least about 0.8 mM (e.g. hydroponic or field conditions).

[0034] In accordance with a particular aspect of the invention, there is provided a method of increasing yield in a crop, the method comprising the steps of: a) planting in a field a soybean HiSil plant as described herein; and b) ensuring that said plant is provided with a supply of Si at a concentration of at least about 0.8 mM.

[0035] In accordance with a particular aspect of the invention, there is provided a method of growing a crop, the method comprising the steps of: a) planting in a field a HiSil plant as described herein; and b) applying a compound to the field that comprises silicon: prior to planting, at planting, or after planting.

[0036] In accordance with a particular aspect of the invention, there is provided a method of growing a crop, the method comprising planting in a field a HiSil plant as described herein, wherein the soil of the field comprises silicon at the level of at least about 0.8 mM.

[0037] In accordance with a particular aspect of the invention, there is provided a method of identifying or selecting a first plant having increased Si uptake, the method comprising the steps of: a) isolating a nucleic acid from a first plant; b) detecting in the nucleic acid the presence of a molecular marker that associates with increased Si uptake and wherein the molecular marker is: associated with a Hi haplotype; or located within 20 cM, 10 cM, 5 cM, 1 cM or 0.5 cM of a chromosomal interval corresponding to a genomic region from Hikmok sorip chromosome 16 at about 92.6 cM to about 132 cM distance; or located from physical positions 33.15M base-pairs to 36.72M base-pairs as indicated on a genetic linkage map from Hikmok sorip (PI372415A); and c) identifying or selecting said soybean plant on the basis of the presence of the molecular marker of b); thereby identifying or selecting a first soybean plant having increased Si uptake.

[0038] In accordance with the HiSil plant as defined herein, the plant or first plant is a crop plant. More particularly, the crop plant is a soybean crop.

[0039] In accordance with a further aspect, there is provided a method of producing a soybean plant having increased Si uptake, the method comprising the steps of: crossing a first Glycine max plant having low Si uptake with a second Glycine max plant having high

[0040] Si uptake, wherein said second Glycine max plant comprises a chromosomal interval associated with Si accumulation corresponding to a genomic region from Hikmok sorip chromosome 16 at about 95 cM to about 102 cM distance or from physical positions 33104446 base-pairs to 3576286 base-pairs as indicated on a genetic linkage map from Hikmok sorip (PI372415A); and producing a progeny plant from the plant cross of a), wherein said progeny plant comprises the chromosomal interval associated with Si accumulation in a) or a portion thereof; thereby producing a soybean plant having increased Si uptake.

[0041] According to a further aspect, the invention provides a method of producing a Glycine max plant with high silicon uptake, the method comprising the steps of: a) isolating a nucleic acid from a Glycine max plant; b) genotyping the nucleic acid of a); c) identifying a plant as comprising at least one molecular marker associated with increased Si uptake wherein said molecular marker is located within 20 cM, 10 cM, ScM, 1 cM or 0.5 cM of a chromosomal interval corresponding to a genomic region from Hikmok sorip chromosome 16 at about 95 cM to about 102 cM distance or from physical positions 33104446 base-pairs to 3576286 base-pairs, or portion thereof as indicated on a genetic linkage map from Hikmok sorip (PI372415A); and d) producing a Glycine max progeny plant from the plant of c) identified as having said molecular marker associated with increased Si uptake.

[0042] In accordance with a further aspect, there is provided a method of producing a Glycine max plant having increased silicon uptake, said method comprising the steps of: a) introducing into a Glycine max plant's genome a HiSil chromosomal interval comprising nucleic acids comprising base pairs corresponding to positions: 1-2658341 of SEQ ID NO: 1; 565530-578331 of SEQ ID NO: 1; 565530-568778 of SEQ ID NO: 1; 567613-568778 of SEQ ID NO: 1; 575050-578331 of SEQ ID NO:1; or 577172-578331 of SEQ ID NO: 1; b) selecting for a Glycine max plant, plant germplasm or plant seed comprising the chromosomal interval of a) by isolating a nucleic acid from said plant and genotyping the nucleic acid for a molecular marker which associates with the presence of the chromosomal interval as well as the trait of increased Si uptake; and c) producing a Glycine max plant having increased silicon uptake.

[0043] According to a further embodiment, there is provided a method of producing a Glycine max plant with high silicon uptake, the method comprising the steps of: a) isolating a nucleic acid from a Glycine max plant; b) genotyping the nucleic acid of a); c) identifying a plant as comprising at least one molecular marker associated with the presence of a Si transporter gene (e.g. any molecular marker described in Tables 15-21) wherein the gene encodes a protein comprising any one of SEQ ID NO: 15 or SEQ ID NO: 17; and d) producing a Glycine max progeny plant from the plant of c) identified as having said molecular marker associated with increased Si uptake.

[0044] According to a further embodiment, there is provided a plant, plant part, or plant seed produced by the method as defined herein.

[0045] In accordance with a further aspect, the invention provides an agronomically elite Glycine max plant capable of accumulating Si in leaf tissue at a concentration of at least 1% Si concentration when plants are provided with a supply of Si at a concentration of about 0.8mM under hydrophonic conditions, wherein the Glycine max comprises a genomic region introduced into its genome corresponding to any one of SEQ ID NO: 14 or 16.

[0046] In accordance with a further aspect, the invention provides a plant of a soybean variety or lineage having high Si uptake, provided that said variety is not Hikmok

[0047] In accordance with a further aspect, the invention provides seeds produced by the HiSil plant as defined herein.

[0048] In accordance with a further aspect, the invention provides a plant having introduced into its genome a nucleic acid sequence encoding a protein having 60%, 70%, 80%, 90%, 95%, or 99% sequence identity to any one of SEQ ID NO: 15 or SEQ ID NO:

[0049] 17.

[0050] According to a particular aspect, the plant is a soybean or Glycine max plant. More particularly, the Glycine max plant is an elite Glycine max plant, provided that the soybean plant is not Hikmok sorip (PI372415A).

[0051] In accordance with a further aspect of the invention, there is provided an isolated polynucleotide encoding a Si transporter selected from the group consisting of SEQ ID NOs: 14 and 16 for use in transforming a plant not comprising a copy of said polynucleotide in its genome for improving Si uptake of the plant.

[0052] In accordance with a further aspect of the invention, there is provided a vector comprising the polynucleotide or an expression cassette as defined herein.

[0053] In accordance with a further aspect of the invention, there is provided a plant expression cassette comprising the polynucleotide as defined herein (e.g. polynucleotide encoding a protein comprising either SEQ ID NO: 15 or 17).

[0054] In accordance with a further aspect, the invention provides a plant expression cassette encoding a Si transporter selected from the group consisting of SEQ ID NOs: 14 and 16.

[0055] In accordance with a further aspect of the invention, there is provided a transgenic plant comprising the plant expression cassette as defined herein.

[0056] In accordance with a further aspect of the invention, there is provided a transgenic seed comprising the plant expression cassette as defined herein.

[0057] According to a further aspect of the invention, there is provided a method of producing a plant having increased silicon uptake, said method comprising the steps of: a) introducing into a plant's genome a nucleic acid encoding a HiSil protein; b) selecting for a plant, plant germplasm or plant seed comprising the nucleic acid of a); and c) producing a plant having increased silicon uptake.

[0058] According to a further aspect of the invention, there is provided a method of producing a disease-resistant plant, the method comprising the step of: stably introducing into a plant genome the plant expression cassette as described herein, wherein said introduction of said plant expression cassette confers increased Si uptake in said plant; thereby producing a disease-resistant plant.

[0059] According to a further aspect of the invention, there is provided a method of producing a plant with increased yield, the method comprising the steps of: stably introducing into a plant genome the plant expression cassette as described herein, wherein said introduction of said plant expression cassette confers increased Si uptake in said plant; thereby producing a plant with increased yield.

[0060] According to a further aspect of the invention, there is provided an agronomically elite soybean seed which is the progeny of a transgenic female ancestor soybean plant having in its genome a recombinant DNA which expresses a Si transporter comprising an amino acid sequence with at last about 80%, 90%, 95%, 99% or 100% sequence identity to the amino acid sequence of any one of SEQ ID NOs: 15 or 17.

[0061] According to a further aspect of the invention, there is provided a method for producing a soybean plant with increased Si uptake, the steps comprising: introducing into a plant cell a recombinant DNA molecule comprising a polynucleotide encoding a polypeptide, wherein the nucleotide sequence of the polynucleotide is selected from the group consisting of: a) a nucleotide sequence set forth as SEQ ID NO: 14 or 16; b) a nucleotide sequence encoding a protein having the amino acid sequence of SEQ ID NO: 15 or 17; c) a nucleotide sequence with at least 90%, at least 91%, at least 92%, at least 93%, at least 94%, at least 95%, at least 96%, at least 97%, at least 98%, at least 99% identity to SEQ ID NO: 14, or 16; and d) a nucleotide sequence encoding a protein with at least 90%, at least 91%, at least 92%, at least 93%, at least 94%, at least 95%, at least 96%, at least 97%, at least 98%, at least 99% identity to SEQ ID NO: 15 and 17; and growing a plant from said plant cell.

[0062] In accordance with a further aspect of the invention, there is provided a plant, plant part or plant seed produced by the method herein defined.

[0063] According to a further aspect of the invention, there is provided a seed for, or a seed from, the plant as defined herein.

[0064] According to a further aspect of the invention, there is provided a cell of a seed as defined herein. Particularly, an elite Glycine max plant cell or seed comprising the HiSil trait.

[0065] According to a further aspect of the invention, there is provided a cell of a plant as defined herein.

[0066] According to a further aspect of the invention, there is provided a kit for producing a silicon high accumulating plant comprising: (a) the seed as defined herein, and (b) at least one constituent for making a silicon soil amendment.

[0067] According to a further aspect of the invention, there is provided a method for growing a plant, comprising the steps of: (a) providing a plant as defined herein or a seed as defined herein; (b) growing a plant therefrom; and (c) irrigating said plant with a silicon soil amendment.

[0068] In accordance with a further aspect, the invention provides a method of introducing a HiSil trait into a soybean plant, comprising: selecting a soybean plant comprising a nucleic acid sequence in its genome that encodes an a protein having 80% sequence identity to SEQ ID NO: 15 or SEQ ID NO:17, wherein the protein comprises a Threonine at a position relative to position 295 of SEQ ID NO:15, and introducing a modification to the nucleic acid sequence such that the encoded protein comprises an Isoleucine at the position relative to position 295 of SEQ ID NO:15, wherein a site-directed nuclease (SDN) introduces the modification to the nucleic acid sequence.

[0069] In accordance with a further aspect, the invention provides a soybean plant produced by one of the method as defined herein.

[0070] According to a particular aspect, the soybean plant is an elite Glycine max plant, provided that the soybean plant is not Hikmok sorip (PI372415A). In another embodiment, the soybean plant is an elite Glycine max plant, provided the soybean plant is not any one of: PI209332, PI404166, PI437655, PI89772, PI372415A, PI90763, or a progeny thereof.

[0071] In accordance with a further aspect, the invention provides an elite soybean plant comprising a nucleic acid sequence that encodes a protein having at least 80% sequence identity to SEQ ID NO: 15 or SEQ ID NO: 17, wherein the protein comprises an Isoleucine at a position corresponding to position 295 of SEQ ID NO:15.

[0072] In accordance with a further aspect, the invention provides a method of growing a soybean crop, the method comprising the steps of: a) planting in a field a soybean plant as described herein and b) applying a compound to the field that comprises silicon: prior to planting, at planting, or after planting.

[0073] In accordance with a further aspect, the invention provides a method of growing a soybean crop, the method comprising: a) selecting a location for planting the soybean crop, wherein the location comprises soil, said soil having a silicon concentration at a level of at least 7 ppm, at least 10 ppm, at least 15 ppm, at least 20 ppm, at least 30 ppm, at least 40 ppm or at least 50 ppm and b) planting a soybean plant as described herein.

### DESCRIPTION OF THE FIGURES

[0074] FIG. 1. Frequency distribution of silicon (Si) accumulation observed in a set of cultivated germplasm. Intervals on x axis are adjusted to make it comparable to FIG. 2.

[0075] FIG. 2. Frequency distribution of silicon (Si) accumulation observed in 141 recombinant inbred lines (RILs).

[0076] FIG. 3. Scanning electron microscopy and X-ray microanalysis mapping images showing silicon (Si) accumulation in leaves harvested from Hikmok sorip and Majesta grown with Si supplementation (1.7 mM). Observations are representative analyses of three samples.

[0077] FIG. 4. Genome-wide association study performed using a set of 139 cultivated soybean germplasm.

[0078] FIG. 5. QTL analysis for silicon (Si) accumulation in soybean leaves among 141 recombinant inbred lines (RILs) derived from crossing Majesta and Hikmok sorip.

[0079] FIG. 6. Genetic map position of the HiSil interval derived from crossing Majesta and Hikmok sorip identified on chromosome 16 from 95 cM to 102 cM.

[0080] FIG. 7. Genetic map position of the Hisil locus for silicon accumulation in soybean leaves identified on chromosome 16 at 95 cM distance.

[0081] FIG. 8. Genome-wide analysis of epistatic interaction for Silicon uptake in soybean leaves from 141 Majesta×Hikmok sorip RILs as verified by EPlstatic QTL mapping performed by ICIMapping.

[0082] FIG. 9. Sequences alignment at HiSil-Del (˜286 bp deletion) locus which was used to develop marker linked to HiSil.

[0083] FIG. 10. Agrose gel showing segregation pattern of HiSil-Del marker in RIL population derived from Hikmok sorip and Majesta.

[0084] FIG. 11. Digested PCR product amplified with HiSil-Mboll in Williams, Hikmok sorip and Majesta showing detectable polymorphism.

[0085] FIG. 12. High resolution QTL of the Hisil locus for silicon accumulation in soybean leaves Hikmok X Majesta RILs.

[0086] FIG. 13. Genetic map position of the HiSil interval on chromosome 16 from 92.6 cM to 132 cM distance.

[0087] FIG. 14. Frequency distribution of average leaf silicon (Si) content observed in F3 (F2:3) lines derived from a cross Hamilton×PI 89772

[0088] FIG. 15. QTL comparison between Hikmok×Majesta and Hamilton×PI89772.

[0089] FIG. 16. Genetic map showing markers and significance of markers in Hamilton×PI89772.

[0090] FIG. 17. Genetic map showing confirmed interval at 5.57 Mb in Majesta×Hikmok sorip and Hamilton×PI89772.

[0091] FIG. 18. Silicon uptake in soybean accession carrying different haplotypes defined based on single nucleotide present in coding sequences of Glyma16g30000 and Glyma16g30020.

[0092] FIG. 19. Protein homology based model of HiSil (Glyma16g30020) constructed using 1-TASSER server.

[0093] FIG. 20. Results of BLASTp search at NCBI server performed to identify HiSil homologs in rice.

[0094] FIG. 21. Photographs of split plant stems after being inoculated with BSR. A. Resistant control under water treatment. B. Resistant control under AgSil treatment. C. Susceptible control under AgSil treatment. D. Susceptible control under water treatment.

[0095] FIG. 22. Photographs of general symptomology and assay layout from Example 8. A. Susceptible control under water treatment. B. Susceptible control under AgSil treatment,

[0096] FIG. 23. Histograms of the trait % BSR within control and treated groups. Please note that both histograms do not include observations of lines “Corsoy 79Nonlnoc A” and “Corsoy 79Nonlnoc B” because they did not get the same inoculation treatment as all other lines in the experiment.

[0097] FIG. 24. Bar graphs representing all treated and non-treated groups from Example 8.

[0098] FIGS. 25. Photographs of Soybean Cyst Nematode (SCN) trial post inoculation. A. AgSil treatment. B. Water treatment.

[0099] FIG. 26. Histograms of the Cyst Counts within A. control and B. treated groups.

[0100] FIG. 27. Photograph of Root-knot Nematode (RKN) trial layout.

[0101] FIG. 28. Histograms of RKN damage rates within the treated and untreated groups.

[0102] FIG. 29. Histograms of RKN damage rates for tested lines only (i.e. no checks included) within the treated and untreated groups,

[0103] FIG. 30. Treated group: bar plots of rates means (over 4 reps) versus MATID; MATID's are arranged according to High and Low (Si accumulators) subgroups,

[0104] FIG. 31. Untreated group: bar plots of rates means (over 4 reps) versus MATID; MATID's are arranged according to High and Low (Si accumulators) subgroups,

[0105] FIG. 32. Boxplots of soybean lines' rates means by High and Low (Si accumulators) subgroups.

[0106] FIG. 33. Effect of silicon (Si) amendment on soybean resistance to Phytophthora sojae race-25. (a) Survival rate differences among plants grown without and with Si; (b) Increased survival rate with Si application in LoSil and HiSil RILs; Average gain in (c) dry weight and (d) plant height with Si.

[0107] FIG. 34. Effect of silicon (Si) amendment on soybean resistance to cocktail of five Phytophthora sojae races (4, 7, 13, 17 and 25). (a) Roots of P. sojae infected soybean plants grown with and without Si; average gain in (b) shoot dry weight and (d) root dry weight with Si; (c) increased survival rate with Si application in LoSil and HiSil RILs.

[0108] FIG. 35. Leaf wilting score of soybean plants grown under hydroponic conditions for three weeks and then imposed water stress by drowning-off water from system. Wilting scale is—1 for no wilting, 2 very slight wilting, 3 wilting, 4 high wilting, 5 dying, and 6 is for dead.

[0109] FIG. 36. Photographs of major steps involved in the grafting of soybean plants

[0110] FIG. 37. Leaf wilting score of soybean plants grown under hydroponic conditions for three weeks and submitted to water stress. Wilting scale is—0 —no wilting; 1—very slight wilting; 2—slight wilting; 3—wilting; 4—high; 5—dying, and 6—dead. MajestaiH represents Majesta shoots grafted on Hikmok rootstock, and Hikmok/M represents Hikmok root grafted on Majesta rootstock.

[0111] FIG. 38. Validation of HiSil in transgenic Arabidopsis. (a) Expression of GUS with root specific promoters CASP2 and NIP5;1. (b) Si accumulation by transgenic Arabidopsis lines for Glyma16g30000 and Glyma16g30020 with alleles representing Williams and Hikmok HiSil

[0112] FIG. 39. Average Si accumulation in HiSil and null plants.

[0113] FIG. 40. Silicon (Si) efflux transport facilitated by Williams and Hikmok type alleles of Glyma16g30020 gene evaluated in Xenopus oocyte assay.

[0114] FIG. 41. Silicon (Si) transport evaluated in Xenopus oocyte assay of different constructs (Hikmok and Williams alleles of Glyma16g:30000 and Glyma16g:30020 without or with point mutations).

[0115] FIG. 42. Schematic map of plasmid clone pCR-GmHiSil1aNrul containing GmHiSil gene sequence. The GmHiSil is flanked by two Nrul sites.

[0116] FIG. 43. Transformation vector for expressing Cas9 and sgRNAs.

### DESCRIPTION OF INVENTION

[0117] This description is not intended to be a detailed catalog of all the different ways in which the invention may be implemented, or all the features that may be added to the instant invention. For example, features illustrated with respect to one embodiment may be incorporated into other embodiments, and features illustrated with respect to a particular embodiment may be deleted from that embodiment. Thus, the invention contemplates that in some embodiments of the invention, any feature or combination of features set forth herein can be excluded or omitted. In addition, numerous variations and additions to the various embodiments suggested herein will be apparent to those skilled in the art in light of the instant disclosure, which do not depart from the instant invention. Hence, the following descriptions are intended to illustrate some particular embodiments of the invention, and not to exhaustively specify all permutations, combinations and variations thereof.

[0118] Unless otherwise defined, all technical and scientific terms used herein have the same meaning as commonly understood by one of ordinary skill in the art to which this invention belongs. The terminology used in the description of the invention herein is for the purpose of describing particular embodiments only and is not intended to be limiting of the invention.

[0119] All publications, patent applications, patents and other references cited herein are incorporated by reference in their entireties for the teachings relevant to the sentence and/or paragraph in which the reference is presented. References to techniques employed herein are intended to refer to the techniques as commonly understood in the art, including variations on those techniques or substitutions of equivalent techniques that would be apparent to one of skill in the art.

[0120] Unless the context indicates otherwise, it is specifically intended that the various features of the invention described herein can be used in any combination. Moreover, the present invention also contemplates that in some embodiments of the invention, any feature or combination of features set forth herein can be excluded or omitted. To illustrate, if the specification states that a composition comprises components A, B and C, it is specifically intended that any of A, B or C, or a combination thereof, can be omitted and disclaimed singularly or in any combination.

### Abbreviations and Definitions

### Abbreviations

[0121] bp: Base-pairs; cM; centimorgan; CMLM: Compressed mixed linear models; GAPIT: Genomic Association and Prediction Integrated Tool; GBS: Genotyping by sequencing; GLM: general linear model; GWAS: genome-wide association study; IGST-GBS: IBIS Genotyping by Sequencing Tool; ICIM: inclusive composite interval mapping; LOD: Logarithm of odds; Mb: million base; PCA: principal component analysis; PVE: phenotypic variance explained; QTL: quantitative trait locus; SNP: single nucleotide polymorphism; RIL: recombinant inbred lines. CAPS: Cleaved Amplified Polymorphic Sequences; CRISPR: Clustered Regularly Interspaced Short Palindromic Repeats; TALENs: Transcription activator-like effector nucleases; BSR: Brown Stem Rot; SCN: Soybean Cyst Nematode; RKN: Root-Knot Nematode.

[0122] Definitions

[0123] The term “about” as used herein refers to a margin of + or 10% of the number indicated. For sake of precision, the term about when used in conjunction with, for example: 90% means 90%+/−9% i.e. from 81% to 99%. More precisely, the term about refer to + or −5% of the number indicated, where for example: 90% means 90%+/−4.5% i.e. from 86.5% to 94.5%.

[0124] As used herein the singular forms “a”, “and”, and “the” include plural referents unless the context clearly dictates otherwise. Thus, for example, reference to “a cell” includes a plurality of such cells and reference to “the culture” includes reference to one or more cultures and equivalents thereof known to those skilled in the art, and so forth. All technical and scientific terms used herein have the same meaning as commonly understood to one of ordinary skill in the art to which this invention belongs unless clearly indicated otherwise.

[0125] As used in this specification and claim(s), the transitional words “comprising” (and any form of comprising, such as “comprise” and “comprises”), “having” (and any form of having, such as “have” and “has”), “including” (and any form of including, such as “includes” and “include”) or “containing” (and any form of containing, such as “contains” and “contain”) are inclusive or open-ended and do not exclude additional, un-recited elements or method steps.

[0126] As used herein, the transitional phrase “consisting essentially of” means that the scope of a claim is to be interpreted to encompass the specified materials or steps recited in the claim and those that do not materially affect the basic and novel characteristic(s) of the claimed invention. Thus, the term “consisting essentially of” when used in a claim of this invention is not intended to be interpreted to be equivalent to “comprising.”

[0127] The term “HiSil Chromosomal interval” means a chromosomal interval corresponding to a genomic region from Hikmok sorip chromosome 16 at about 92.6 cM to about 132 cM distance or from physical positions 31.15Mbase-pairs to 36.72Mbase-pairs, particularly at about 95 cM to about 102 cM distance or from physical positions 33104446 base-pairs to 3576286 base-pairs, or portion thereof as indicated on a genetic linkage map from Hikmok sorip (PI372415A).

[0128] As used herein, phrases such as “between X and Y” and “between about X and Y” should be interpreted to include X and Y. As used herein, phrases such as “between about X and Y” mean “between about X and about Y” and phrases such as “from about X to Y” mean “from about X to about Y.”

[0129] As used herein, the term “allele” refers to one of two or more different nucleotides or nucleotide sequences that occur at a specific locus (e.g. Table 18 illustrates unfavorable and favorable alleles for the HiSil trait).

[0130] A “locus” is a position on a chromosome where a gene or marker or allele is located. In some embodiments, a locus may encompass one or more nucleotides. For example, any marker listed in Tables 15-21 depicts a “locus” that is associated with the HiSil trait. Further, any marker within the HiSil Chromosomal interval can be a locus associated with the HiSil trait.

[0131] As used herein, the terms “desired allele,” “target allele” and/or “allele of interest” are used interchangeably to refer to an allele associated with a desired trait. In some embodiments, a desired allele may be associated with either an increase or a decrease (relative to a control) of or in a given trait, depending on the nature of the desired phenotype. In some embodiments of this invention, the phrase “desired allele”, “target allele” or “allele of interest” refers to an allele(s) that is associated with the HiSiI trait in a soybean plant relative to a control soybean plant not having the target allele or alleles. Thus, for example, a soybean plant comprising one or more desired alleles as indicated in Table 18 or markers closely associated with markers in Tables 15-21 may be utilized in selecting, identifying or producing soybean plants with increased Si accumulation as compared to a control plant not comprising said markers (e.g. HiSil Soybean Plants).

[0132] As used herein, the terms “marker” and “genetic marker” are used interchangeably to refer to a nucleotide and/or a nucleotide sequence that has been associated with a phenotype and/or trait. A marker may be, but is not limited to, an allele, a gene, a haplotype, a chromosome interval, a restriction fragment length polymorphism (RFLP), a simple sequence repeat (SSR), a random amplified polymorphic DNA (RAPD), a cleaved amplified polymorphic sequence (CAPS) (Rafalski and Tingey, Trends in Genetics 9:275 (1993)), an amplified fragment length polymorphism (AFLP) (Vos et al., Nucleic Acids Res. 23:4407 (1995)), a single nucleotide polymorphism (SNP) (Brookes, Gene 234:177 (1993)), a sequence-characterized amplified region (SCAR) (Paran and Michelmore, Theor. Appl. Genet. 85:985 (1993)), a sequence-tagged site (STS) (Onozaki et al., Euphytica 138:255 (2004)), a single-stranded conformation polymorphism (SSCP) (Orita et al., Proc. Natl. Acad. Sol, USA 86:2766 (1989)), an inter-simple sequence repeat (ISSR) (Blair et al., Theor Appl. Genet. 98:780 (1999)), an inter-retrotransposon amplified polymorphism (IRAP), a retrotransposon-microsatellite amplified polymorphism (REMAP) (Kalendar et al., Theor Appi. Genet. 98:704 (1999)), an isozyme marker, an RNA cleavage product (such as a Lynx tag) or any combination of the markers described herein. A marker may be present in genomic or expressed nucleic acids (e.g., ESTs). A large number of soybean genetic markers are known in the art, and are published or available from various sources, such as the SoyBase internet resource (www.soybase.org). In some embodiments, a genetic marker of this invention is a SNP allele (e.g. see Table 15-20), a SNP allele located in a chromosome interval corresponding to the HiSil Chromosomal interval) and/or a haplotype (e.g. H1 haplotype) or a combination of SNP alleles from Table 20, each of which are associated with the HiSil Trait.

[0133] Markers corresponding to genetic polymorphisms between members of a population can be detected by methods well-established in the art. These include, but are not limited to, nucleic acid sequencing, hybridization methods, amplification methods (e.g., PCR-based sequence specific amplification methods), detection of restriction fragment length polymorphisms (RFLP), detection of isozyme markers, detection of polynucleotide polymorphisms by allele specific hybridization (ASH), detection of amplified variable sequences of the plant genome, detection of self-sustained sequence replication, detection of simple sequence repeats (SSRs), detection of randomly amplified polymorphic DNA (RAPD), detection of single nucleotide polymorphisms (SNPs), and/or detection of amplified fragment length polymorphisms (AFLPs). Thus, in some embodiments of this invention, such well known methods can be used to detect the SNP alleles as defined herein.

[0134] Accordingly, in some embodiments of this invention, a marker is detected by amplifying a Glycine sp. nucleic acid with two oligonucleotide primers by, for example, an amplification reaction such as the polymerase chain reaction (PCR).

[0135] A “marker allele,” also described as an “allele of a marker locus,” can refer to one of a plurality of polymorphic nucleotide sequences found at a marker locus in a population that is polymorphic for the marker locus.

[0136] Marker-assisted selection (herein, “MAS”) or interchangeably marker-assisted breeding (herein, “MAB”) is a process by which phenotypes are selected based on marker genotypes. Marker assisted selection includes the use of marker genotypes for identifying plants for inclusion in and/or removal from a breeding program or planting.

[0137] As used herein, the terms “marker locus”, “marker loci”, “locus” or “loci” refer to a specific chromosome location or locations in the genome of an organism where a specific marker or markers can be found. A marker locus can be used to track the presence of a second linked locus, e.g., a linked locus that encodes or contributes to expression of a phenotypic trait. For example, a marker locus can be used to monitor segregation of alleles at a locus, such as a QTL or single gene, that are genetically or physically linked to the marker locus.

[0138] As used herein, the term “molecular marker” may be used to refer to a genetic marker, as defined above, or an encoded product thereof (e.g., a protein) used as a point of reference when identifying a linked locus. A molecular marker can be derived from genomic nucleotide sequences or from expressed nucleotide sequences (e.g., from a spliced RNA, a cDNA, etc.). The term also refers to nucleotide sequences complementary to or flanking the marker sequences, such as nucleotide sequences used as probes and/or primers capable of amplifying the marker sequence. Nucleotide sequences are “complementary” when they specifically hybridize in solution, e.g., according to Watson-Crick base pairing rules. Some of the markers described herein can also be referred to as hybridization markers when located on an indel region. This is because the insertion region is, by definition, a polymorphism vis-a-vis a plant without the insertion. Thus, the marker need only indicate whether the indel region is present or absent. Any suitable marker detection technology may be used to identify such a hybridization marker, e.g., technology for SNP detection.

[0139] A marker is “associated with” a trait when said trait is linked to the marker and when the presence of the marker is an indicator of whether and/or to what extent the desired trait or trait form will occur in a plant/germplasm comprising the marker. Similarly, a marker is “associated with” an allele or chromosome interval when it is linked to it and when the presence of the marker is an indicator of whether the allele or chromosome interval is present in a plant/germplasm comprising the marker. For example, “a marker associated with the HiSil trait” refers to a marker whose presence or absence can be used to predict whether a plant will display increased Si accumulation (e.g. markers within the

[0140] HiSil chromosomal interval or those closely associated with said HiSil chromosomal interval, also see Tables 15 to 21),

[0141] As used herein, the term “probe” refers to a single-stranded oligonucleotide sequence that will form a hydrogen-bonded duplex with a complementary sequence in a target nucleic acid sequence analyte or its cDNA derivative. Thus, a “marker probe” and “probe” refers to a nucleotide sequence or nucleic acid molecule that can be used to detect the presence of one or more particular alleles within a marker locus (e.g., a nucleic acid probe that is complementary to all of or a portion of the marker or marker locus, through nucleic acid hybridization). Marker probes comprising about 8, 10, 15, 20, 30, 40, 50, 60, 70, 80, 90, 100 or more contiguous nucleotides may be used for nucleic acid hybridization. Alternatively, in some aspects, a marker probe refers to a probe of any type that is able to distinguish (i.e., genotype) the particular allele that is present at a marker locus. Non-limiting examples of a probe of this invention may be found in the Table 19 and the Sequence Listing (i.e. SEQ ID NOs 278 to 495).

[0142] As used herein, the term “primer” refers to an oligonucleotide which is capable of annealing to a nucleic acid target and serving as a point of initiation of DNA synthesis when placed under conditions in which synthesis of a primer extension product is induced (e.g., in the presence of nucleotides and an agent for polymerization such as DNA polymerase and at a suitable temperature and pH). A primer (in some embodiments an extension primer and in some embodiments an amplification primer) is in some embodiments single stranded for maximum efficiency in extension and/or amplification. In some embodiments, the primer is an oligodeoxyribonucleotide. A primer is typically sufficiently long to prime the synthesis of extension and/or amplification products in the presence of the agent for polymerization. The minimum length of the primer can depend on many factors, including, but not limited to temperature and composition (A/T vs. G/C content) of the primer. In the context of amplification primers, these are typically provided as a pair of bi-directional primers consisting of one forward and one reverse primer or provided as a pair of forward primers as commonly used in the art of DNA amplification such as in PCR amplification. As such, it will be understood that the term “primer,” as used herein, can refer to more than one primer, particularly in the case where there is some ambiguity in the information regarding the terminal sequence(s) of the target region to be amplified. Hence, a “primer” can include a collection of primer oligonucleotides containing sequences representing the possible variations in the sequence or includes nucleotides which allow a typical base pairing, Primers can be prepared by any suitable method, Methods for preparing oligonucleotides of specific sequence are known in the art, and include, for example, cloning and restriction of appropriate sequences and direct chemical synthesis. Chemical synthesis methods can include, for example, the phospho di- or tri-ester method, the diethylphosphoramidate method and the solid support method disclosed in U.S. Pat. No, 4,458,066. Primers can be labeled, if desired, by incorporating detectable moieties by for instance spectroscopic, fluorescence, photochemical, biochemical, immunochemical, or chemical moieties. Non-limiting examples of primers of the invention include Tables 13, 14 and/or 19 and the Sequence Listing (e.g, SEQ ID NOs: 27 to 277).

[0143] As used herein, the terms “backcross” and “backcrossing” refer to the process whereby a progeny plant is crossed back to one of its parents one or more times (e.g., 1, 2, 3, 4, 5, 6, 7, 8, 9, 10, or more.). In a backcrossing scheme, the “donor” parent refers to the parental plant with the desired gene or locus to be introgressed. The “recipient” parent (used one or more times) or “recurrent” parent (used two or more times) refers to the parental plant into which the gene or locus is being introgressed. For example, see Ragot, M. et al. Marker-assisted Backcrossing: A Practical Example, in TECHNIQUES ET UTILISATIONS DES MARQUEURS MOLECULAIRES LES COLLOQUES, Vol. 72, pp. 45-56 (1995); and Openshaw et al., Marker-assisted Selection in Backcross Breeding, in PROCEEDINGS OF THE SYMPOSIUM “ANALYSIS OF MOLECULAR MARKER DATA,” pp. 41-43 (1994). The initial cross gives rise to the F1 generation. The term “BC1” refers to the second use of the recurrent parent, “BC2” refers to the third use of the recurrent parent, and so on. In some embodiments, the number of backcrosses can be about 1 to about 10 (e.g., 1, 2, 3, 4, 5, 6, 7, 8, 9, 10). In some embodiments, the number of backcrosses is about 7.

[0144] As used herein, the terms “cross” or “crossed” refer to the fusion of gametes via pollination to produce progeny (e.g., cells, seeds or plants). The term encompasses both sexual crosses (the pollination of one plant by another) and selfing (self-pollination, e.g., when the pollen and ovule are from the same plant). The term “crossing” refers to the act of fusing gametes via pollination to produce progeny.

[0145] As used herein, the terms “cultivar” and “variety” refer to a group of similar plants that by structural or genetic features and/or performance can be distinguished from other varieties within the same species.

[0146] As used herein, the terms “Introgression”, “introgressing” and “introgressed” refer to both the natural and artificial transmission of a desired allele or combination of desired alleles of a genetic locus or genetic loci from one genetic background to another. For example, a desired allele at a specified locus can be transmitted to at least one progeny via a sexual cross between two parents of the same species, where at least one of the parents has the desired allele in its genome. Alternatively, for example, transmission of an allele can occur by recombination between two donor genomes, e.g., in a fused protoplast, where at least one of the donor protoplasts has the desired allele in its genome. The desired allele may be a selected allele of a marker, a QTL, a transgene, or the like. Offspring comprising the desired allele can be backcrossed one or more times (e.g., 1, 2, 3, 4, 5, 6, 7, 8, 9, 10 or more times) to a line having a desired genetic background, selecting for the desired allele, with the result being that the desired allele becomes fixed in the desired genetic background. For example, a marker associated with the HiSil trait may be introgressed from a donor into a recurrent parent that is a LoSil plant. The resulting offspring could then be backcrossed one or more times and selected until the progeny comprises the genetic marker(s) associated with the HiSil trait (e.g. markers as illustrated in Tables 15-21) in the recurrent parent background.

[0147] As used herein, the term “linkage” refers to the degree with which one marker locus is associated with another marker locus or some other locus (for example, a BSR or FLS resistance locus). The linkage relationship between a genetic marker and a phenotype may be given as a “probability” or “adjusted probability.” Linkage can be expressed as a desired limit or range. For example, in some embodiments, any marker is linked (genetically and physically) to any other marker when the markers are separated by less than about 50, 40, 30, 25, 20, or 15 map units (or cM). For example, one aspect of the invention are the use of markers associated with the HiSil trait to identify or produce HiSil plants wherein the markers are located within 50, 40, 30, 25, 20, or 15 map units (or cM) from any marker listed in Tables 15-21 or from the HiSil chromosome interval.

[0148] A centimorgan (“cM”) or a genetic map unit (m.u.) is a unit of measure of recombination frequency and is defined as the distance between genes for which one product of meiosis in 100 is recombinant. One cM is equal to a 1% chance that a marker at one genetic locus will be separated from a marker at a second locus due to crossing over in a single generation. Thus, a recombinant frequency (RF) of 1% is equivalent to 1 m.u.

[0149] As used herein, the phrase “linkage group” refers to all of the genes or genetic traits that are located on the same chromosome. Within the linkage group, those loci that are close enough together can exhibit linkage in genetic crosses. Since the probability of crossover increases with the physical distance between loci on a chromosome, loci for which the locations are far removed from each other within a linkage group might not exhibit any detectable linkage in direct genetic tests. The term “linkage group” is mostly used to refer to genetic loci that exhibit linked behavior in genetic systems where chromosomal assignments have not yet been made. Thus, the term “linkage group” is synonymous with the physical entity of a chromosome, although one of ordinary skill in the art will understand that a linkage group can also be defined as corresponding to a region of (Le., less than the entirety) of a given chromosome.

[0150] As used herein, the term “linkage disequilibrium” refers to a non-random segregation of genetic loci or traits (or both). In either case, linkage disequilibrium implies that the relevant loci are within sufficient physical proximity along a length of a chromosome so that they segregate together with greater than random (i.e., non-random) frequency (in the case of co-segregating traits, the loci that underlie the traits are in sufficient proximity to each other). Markers that show linkage disequilibrium are considered linked. Linked loci co-segregate more than 50% of the time, e.g., from about 51% to about 100% of the time. In other words, two markers that co-segregate have a recombination frequency of less than 50% (and, by definition, are separated by less than 50 cM on the same chromosome). As used herein, linkage can be between two markers, or alternatively between a marker and a phenotype. A marker locus can be “associated with” (linked to) a trait, e.g., HiSil trait. The degree of linkage of a genetic marker to a phenotypic trait is measured, e.g., as a statistical probability of co-segregation of that marker with the phenotype.

[0151] The term “gene” as used herein refers to any DNA sequence comprising several operably linked DNA fragments such as a promoter and a 5′ regulatory region, a coding sequence and an untranslated 3′ region comprising a polyadenylation site.

[0152] A “genetic map” is a description of genetic linkage relationships among loci on one or more chromosomes within a given species, generally depicted in a diagrammatic or tabular form. For each genetic map, distances between loci are measured by the recombination frequencies between them. Recombination between loci can be detected using a variety of markers. A genetic map is a product of the mapping population, types of markers used, and the polymorphic potential of each marker between different populations. The order and genetic distances between loci can differ from one genetic map to another.

[0153] As used herein, the term “genotype” refers to the genetic constitution of an individual (or group of individuals) at one or more genetic loci, as contrasted with the observable and/or detectable and/or manifested trait (the phenotype). Genotype is defined by the allele(s) of one or more known loci that the individual has inherited from its parents. The term genotype can be used to refer to an individual's genetic constitution at a single locus, at multiple loci, or more generally, the term genotype can be used to refer to an individual's genetic make up for all the genes in its genome. Genotypes can be indirectly characterized, e.g., using markers and/or directly characterized by, e.g., nucleic acid sequencing.

[0154] As used herein, the term “germplasm” refers to genetic material of or from an individual (e.g., a plant), a group of individuals (e.g., a plant line, variety or family), or a clone derived from a line, variety, species, or culture. The germplasm can be part of an organism or cell, or can be separate from the organism or cell. In general, germplasm provides genetic material with a specific genetic makeup that provides a foundation for some or all of the hereditary qualities of an organism or cell culture. As used herein, germplasm includes cells, seed or tissues from which new plants may be grown, as well as plant parts that can be cultured into a whole plant (e.g., leaves, stems, buds, roots, pollen, cells, etc.). In some embodiments, germplasm includes but is not limited to tissue culture.

[0155] A “haplotype” is the genotype of an individual at a plurality of genetic loci, i.e., a combination of alleles. Typically, the genetic loci that define a haplotype are physically and genetically linked, i.e., on the same chromosome segment. The term “haplotype” can refer to polymorphisms at a particular locus, such as a single marker locus, or polymorphisms at multiple loci along a chromosomal segment.

[0156] As used herein, the term “H1 haplotype” refers to a marker locus comprising a A at position 33673022; a G at position 33673483; a C at position 33681630; a T at position 33682500; a G at position 33683047 and a C at position 33683049 corresponding to a genomic region from Hikmok sorip chromosome 16 at about 92.6 cM to about 132 cM distance or from physical positions 31.15 Mbase-pairs to 36.72 Mbase-pairs, particularly at about 95 cM to about 102 cM distance or from physical positions 33104446 base-pairs to 3576286 base-pairs as indicated on a genetic linkage map from Hikmok sorip (PI372415A) (also see for example, Table 9).

[0157] As used herein, the term “heterozygous” refers to a genetic status wherein different alleles reside at corresponding loci on homologous chromosomes.

[0158] As used herein, the term “homozygous” refers to a genetic status wherein identical alleles reside at corresponding loci on homologous chromosomes. One embodiment of the invention is a elite soybean plant that is homozygous for the HiSil trait.

[0159] The PCR method is well described in handbooks and known to the skilled person. After amplification by FOR, target polynucleotides can be detected by hybridization with a probe polynucleotide, which forms a stable hybrid with the target sequence under stringent to moderately stringent hybridization and wash conditions. If it is expected that the probes are essentially completely complementary (Le., about 99% or greater) to the target sequence, stringent conditions can be used. If some mismatching is expected, for example if variant strains are expected with the result that the probe will not be completely complementary, the stringency of hybridization can be reduced. In some embodiments, conditions are chosen to rule out non-specific/adventitious binding. Conditions that affect hybridization, and that select against non-specific binding are known in the art, and are described in, for example, Sambrook & Russell (2001). Molecular Cloning: A Laboratory Manual, Third Edition, Cold Spring Harbor Laboratory Press, Cold Spring Harbor, New York, United States of America. Generally, lower salt concentration and higher temperature hybridization and/or washes increase the stringency of hybridization conditions.

[0160] Different nucleotide sequences or polypeptide sequences having homology are referred to herein as “homologues.” The term homologue includes homologous sequences from the same and other species and orthologous sequences from the same and other species. “Homology” refers to the level of similarity between two or more nucleotide sequences and/or amino acid sequences in terms of percent of positional identity (i.e., sequence similarity or identity). Homology also refers to the concept of similar functional properties among different nucleic acids, amino acids, and/or proteins.

[0161] As used herein, the phrase “nucleotide sequence homology” refers to the presence of homology between two polynucleotides. Polynucleotides have “homologous” sequences if the sequence of nucleotides in the two sequences is the same when aligned for maximum correspondence. The “percentage of sequence homology” for polynucleotides, such as 50, 55, 60, 65, 70, 75, 80, 85, 90, 95, 96, 97, 98, 99 or 100 percent sequence homology, can be determined by comparing two optimally aligned sequences over a comparison window (e.g., about 20-200 contiguous nucleotides), wherein the portion of the polynucleotide sequence in the comparison window can include additions or deletions (Le., gaps) as compared to a reference sequence for optimal alignment of the two sequences. Optimal alignment of sequences for comparison can be conducted by computerized implementations of known algorithms, or by visual inspection. Readily available sequence comparison and multiple sequence alignment algorithms are, respectively, the Basic Local Alignment Search Tool (BLAST; Altschul et al. (1990) J Mol Biol 215:403-10; Altschul et al. (1997) Nucleic Acids Res 25:3389-3402) and ClustalX (Chenna et al. (2003) Nucleic Acids Res 31:3497-3500) programs, both available on the Internet. Other suitable programs include, but are not limited to, GAP, BestFit, PlotSimilarity, and FASTA, which are part of the Accelrys GCG Package available from Accelrys Software, Inc, of San Diego, Calif., United States of America.

[0162] As used herein “sequence identity” refers to the extent to which two optimally aligned polynucleotide or polypeptide sequences are invariant throughout a window of alignment of components, e.g., nucleotides or amino acids. “Identity” can be readily calculated by known methods including, but not limited to, those described in: Computational Molecular Biology (Lesk, A. M., ed.) Oxford University Press, New York (1988); Biocomputing: Informatics and Genome Projects (Smith, D. W., ed.) Academic Press, New York (1993); Computer Analysis of Sequence Data, Part I (Griffin, A. M., and Griffin, H. G., eds.) Humana Press, New Jersey (1994); Sequence Analysis in Molecular Biology (von Heinje, G., ed.) Academic Press (1987); and Sequence Analysis Primer (Gribskov, M. and Devereux, J., eds.) Stockton Press, New York (1991).

[0163] As used herein, the term “substantially identical” or “corresponding to” means that two nucleotide sequences have at least about 50%, 60%, 70%, 75%, 80%, 85%, 90% or 95% sequence identity. In some embodiments, two nucleotide sequences can have at least about 75%, 80%, 85%, 90%, 95%, or 100% sequence identity, and any range or value therein. In representative embodiments, two nucleotide sequences can have at least about 95%, 96%, 97%, 98%, 99% or 100% sequence identity, and any range or value therein.

[0164] An “identity fraction” for aligned segments of a test sequence and a reference sequence is the number of identical components which are shared by the two aligned sequences divided by the total number of components in the reference sequence segment, i.e., the entire reference sequence or a smaller defined part of the reference sequence. Percent sequence identity is represented as the identity fraction multiplied by 100. As used herein, the term “percent sequence identity” or “percent identity” refers to the percentage of identical nucleotides in a linear polynucleotide sequence of a reference (“query”) polynucleotide molecule (or its complementary strand) as compared to a test (“subject”) polynucleotide molecule (or its complementary strand) when the two sequences are optimally aligned (with appropriate nucleotide insertions, deletions, or gaps totaling less than 20 percent of the reference sequence over the window of comparison). In some embodiments, “percent identity” can refer to the percentage of identical amino acids in an amino acid sequence.

[0165] Optimal alignment of sequences for aligning a comparison window is well known to those skilled in the art and may be conducted by tools such as the local homology algorithm of Smith and Waterman, the homology alignment algorithm of Needleman and Wunsch, the search for similarity method of Pearson and Lipman, and optionally by computerized implementations of these algorithms such as GAP, BESTFIT, FASTA, and

[0166] TFASTA available as part of the GCG® Wisconsin Package@ (Accelrys Inc., Burlington, Mass.). The comparison of one or more polynucleotide sequences may be to a full-length polynucleotide sequence or a portion thereof, or to a longer polynucleotide sequence. For purposes of this invention “percent identity” may also be determined using BLASTX version 2.0 for translated nucleotide sequences and BLASTN version 2.0 for polynucleotide sequences.

[0167] The percent of sequence identity can be determined using the “Best Fit” or “Gap” program of the Sequence Analysis Software Package™ (Version 10; Genetics Computer Group, Inc., Madison, Wis.). “Gap” utilizes the algorithm of Needleman and Wunsch (Needleman and Wunsch, J Mol. Biol. 48:443-453, 1970) to find the alignment of two sequences that maximizes the number of matches and minimizes the number of gaps. “BestFit” performs an optimal alignment of the best segment of similarity between two sequences and inserts gaps to maximize the number of matches using the local homology algorithm of Smith and Waterman (Smith and Waterman, Adv. Appl. Math,, 2:482-489, 1981, Smith et al., Nucleic Acids Res, 11:2205-2220, 1983).

[0168] Useful methods for determining sequence identity are also disclosed in Guide to Huge Computers (Martin J. Bishop, ed., Academic Press, San Diego (1994)), and Carillo et al. (Applied Math 48:1073(1988)), More particularly, preferred computer programs for determining sequence identity include but are not limited to the Basic Local Alignment Search Tool (BLAST) programs, which are publicly available from National Center

[0169] Biotechnology Information (NCB') at the National Library of Medicine, National Institute of Health, Bethesda, Md. 20894; see BLAST Manual, Altschul et al., NCBI, NLM, NIH; (Altschul et al., J. Mol. Biol. 215:403-410 1990)); version 2.0 or higher of BLAST programs allows the introduction of gaps (deletions and insertions) into alignments; for peptide sequence, BLASTX can be used to determine sequence identity: and for polynucleotide sequence, BLASTN can be used to determine sequence identity.

[0170] As used herein, the terms “phenotype,” “phenotypic trait” or “trait” refer to one or more traits of an organism. The phenotype can be observable to the naked eye, or by any other means of evaluation known in the art, e.g., microscopy, biochemical analysis, and/or an electromechanical assay. In some cases, a phenotype is directly controlled by a single gene or genetic locus, i.e., a “single gene trait.” In other cases, a phenotype is the result of several genes. For example, the following invention comprises two genes that are causative for the HiSil trait wherein the genes independently or together confer the increased Si accumulation in a soybean plant.

[0171] As used herein, the term “polymorphism” refers to a variation in the nucleotide sequence at a locus, where said variation is too common to be due merely to a spontaneous mutation. A polymorphism can be a single nucleotide polymorphism (SNP), or an insertion/deletion polymorphism, also referred to herein as an “indel.” Additionally, the variation can be in a transcriptional profile or a methylation pattern. The polymorphic site or sites of a nucleotide sequence can be determined by comparing the nucleotide sequences at one or more loci in two or more germplasm entries.

[0172] As used herein, the term “plant part” includes but is not limited to embryos, pollen, seeds, leaves, flowers (including but not limited to anthers, ovules and the like), fruit, stems or branches, roots, root tips, cells including cells that are intact in plants and/or parts of plants, protoplasts, plant cell tissue cultures, plant calli, plant clumps, and the like. Thus, a plant part includes soybean tissue culture from which soybean plants can be regenerated. Further, as used herein, “plant cell” refers to a structural and physiological unit of the plant, which comprises a cell wall and also may refer to a protoplast. A plant cell of the present invention can be in the form of an isolated single cell or can be a cultured cell or can be a part of a higher-organized unit such as, for example, a plant tissue or a plant organ. One embodiment of the invention is a plant part from a plant having the HiSil trait.

[0173] As used herein, the term “population” refers to a genetically heterogeneous collection of plants sharing a common genetic derivation.

[0174] As used herein, the terms “progeny,” “progeny plant,” and/or “offspring” refer to a plant generated from a vegetative or sexual reproduction from one or more parent plants. A progeny plant may be obtained by cloning or selfing a single parent plant, or by crossing two parental plants and includes selfings as well as the F1 or F2 or still further generations. An F1 is a first-generation offspring produced from parents at least one of which is used for the first time as donor of a trait, while offspring of second generation (F2) or subsequent generations (F3, F4, and the like) are specimens produced from selfings or crossings of F1s, F2s and the like. An F1 can thus be (and in some embodiments is) a hybrid resulting from a cross between two true breeding parents (the phrase “true-breeding” refers to an individual that is homozygous for one or more traits), while an F2 can be an offspring resulting from self-pollination of the F1 hybrids.

[0175] As used herein, the term “reference sequence” refers to a defined nucleotide sequence used as a basis for nucleotide sequence comparison (e.g., Chromosome 16 of Glycine max cultivar Williams 82). The reference sequence for a marker, for example, can be obtained by genotyping a number of lines at the locus or loci of interest, aligning the nucleotide sequences in a sequence alignment program, and then obtaining the consensus sequence of the alignment. Hence, a reference sequence identifies the polymorphisms in alleles at a locus. A reference sequence may not be a copy of an actual nucleic acid sequence from any particular organism; however, it is useful for designing primers and probes for actual polymorphisms in the locus or loci.

[0176] Genetic loci correlating with particular phenotypes, such as increased Si accumulation, can be mapped in an organism's genome. By identifying a marker or cluster of markers that co-segregate with a trait of interest, the breeder is able to rapidly select a desired phenotype by selecting for the proper marker (a process called marker-assisted selection, or MAS). Such markers may also be used by breeders to design genotypes in silico and to practice whole genome selection.

[0177] As used herein, unless specified otherwise, or referring the a specific SEQ ID NO., all numbering of chromosomes, genes, base pairs, amino acids or other sequences are based on the reference sequence of soybean variety Williams82 as found in publicly available Williams82 reference line (SOYBASE); Soybean genome assembly is from JGI release 8, based on the original Glyma v1 (January 2012).

[0178] The term “chimeric gene” as used herein refers to a gene wherein, in nature, the coding sequence is not associated with the promoter or with at least one other regulatory region of the DNA in the gene.

[0179] The term “expression cassette” as used herein refers to a transferable region of DNA comprising a chimeric gene which is flanked by one or more restriction or other sites which facilitate precise excision from one DNA locus and insertion into another.

[0180] The term “HiSil protein” as used herein means a protein that, when introduced into a plant genome, confers increased Si accumulation/uptake. Particularly, the HiSil protein comprises a protein sequence having at least 60%, 65%, 70%, 75%, 80%, 85%, 90%, 95%, 99% sequence identity with SEQ ID NO: 15, where the polypeptide comprises at least one amino acid corresponding to a proline at position 5, a isoleucine at position 295 or a valine at position 439; and/or SEQ ID NO: 17, where the polypeptide comprises at least one amino acid corresponding to a histidine at position 322 or a glycine at position 431; and its introduction into a plant's genome confers high Si uptake in the plant.

[0181] The term “HiSil trait” as used herein means having a nucleotide encoding for a HiSil Protein in its genome. Therefore, a plant comprising that trait will have a dry weight silicon of at least 1% after at least 28 days when grown and supplied with a silicon concentration of at least about 0.5 mM, 0.6 mM, 0.7 mM, 0.75 mM, or 0.8 mM, under hydroponic conditions (temperature about 20° C.-26° C.; humidity about 55%-65%). More particularly, a high Si uptake plant comprises a Si concentration higher than about 1.53% in leaf when the plant is provided with a supply of Si at a concentration of at least about 1.5mM, Most particularly, a high Si uptake plant comprises a Si concentration higher than 1.53%; 1.54%; 1.55%; 1.56%; 1.57%; 1.58%, 1.59%; or 1.6% Si concentration in leaf when the plant is provided with a supply of Si at a concentration of at least about 1.5mM.

[0182] A “HiSil Plant” is a plant having the HiSil trait. More specifically, a “HiSil Soybean Plant” is a soybean plant having the HiSil trait. A “HiSil Glycine max Plant” is a Glycine max plant having the HiSil Trait.

[0183] A “LoSil Plant” is a plant not having the HiSil trait.

[0184] As used herein, a plant having “high Si uptake” means increased silicon accumulation when compared to average silicon accumulation in the same plant.

[0185] Particularly, average silicon accumulation is established in a soybean plant of the Williams82 variety when grown under hydroponic conditions (as defined herein).

[0186] Therefore, a plant having high Si uptake will have a dry weight silicon of at least about 1% when grown with silicon concentration of at least about 0.4 mM, 0.5 mM, 0.6 mM, 0.7 mM, or 0.8 mM, under hydroponic conditions. For example, increased Si accumulation in high Si uptake plant represents an increase in Si uptake of about 0.1% to about 3.0% when compared to the original low Si uptake plant. For example, an increased accumulation of about 10% to about 300% in total Si concentration in at least one plant part is considered an increased in Si uptake when compared to a low Si uptake plant, when both plants are supplied with Si at a concentration of at least about 0.8 mM.

[0187] Particularly, an increased SI accumulation of about 1.1×, 1.2×, 1.3× 1.4×, 1.5×, 1.6×, 1.7×, 1.8×, 1.9×, 2×, 2.5× or 3× when compared to a LoSil plant under the same growing conditions, is considered an increased in Si uptake.

[0188] The term “LoSil protein” as used herein means a protein that, when present into a plant genome, confers average Si accumulation. As used herein, a plant having “low Si uptake” means average Si accumulation in non-Si accumulating plants. For example, a LoSil soybean plant has a silicon uptake corresponding about to the level of Williams82.

[0189] Particularly, the term “low Si uptake” as used herein means a plant having a dry weight silicon of less than about 1% after about 28 days with silicon concentration of about 0.8 mM, when grown under hydroponic conditions. For example, low/normal/basic/average Si accumulation in plants is around from 0.65% to about 1.5% Si accumulation. More particularly, a plant having low Si uptake comprises a Si concentration lower than about 1.5% Si concentration in leaf when the plant is provided with a supply of Si at a concentration of at least about 1.5 mM. Most particularly, a plant having low Si uptake comprises a Si concentration less than 1.49%; 1.50%; 1.51%; 1.52% or 1.53% Si concentration in leaf when the plant is provided with a supply of Si at a concentration of at least about 1.5 mM.

[0190] The term “introduced” as used herein, in connection to a plant, means accomplished by any manner including, but not limited to; introgression, transgenic, Clustered Regularly Interspaced Short Palindromic Repeats modification (CRISPR), Transcription activator-like effector nucleases (TALENs) (Feng et al. 2013, Joung & Sander 2013), meganucleases, or zinc finger nucleases (ZFNs).

[0191] The term “plant” as used herein means a living organism of the kind exemplified by cereals, trees, shrubs, herbs, grasses, ferns, and mosses, that usually has a stem, leaves, roots and flowers, and produces seeds and typically grows in a permanent site (such as soil), absorbing water and inorganic substances through its roots, and synthesizing nutrients in its leaves by photosynthesis using the green pigment chlorophyll; or a tissue culture thereof.

[0192] The term “crop plant”, means in particular monocotyledons such as cereals (wheat, millet, sorghum, rye, triticale, oats, barley, teff, spelt, buckwheat, fonio and quinoa), rice, maize (corn), and/or sugar cane; or dicotyledon crops such as beet (such as sugar beet or fodder beet); fruits (such as ponies, stone fruits or soft fruits, for example apples, pears, plums, peaches, almonds, cherries, strawberries, raspberries or blackberries); leguminous plants (such as beans, lentils, peas or soybeans); oil plants (such as rape, mustard, poppy, olives, sunflowers, coconut, castor oil plants, cocoa beans or groundnuts); cucumber plants (such as marrows, cucumbers or melons); fibre plants (such as cotton, flax, hemp or jute); citrus fruit (such as oranges, lemons, grapefruit or mandarins); vegetables (such as spinach, lettuce, cabbages, carrots, tomatoes, potatoes, cucurbits or paprika); lauraceae (such as avocados, cinnamon or camphor); tobacco; nuts; coffee; tea; vines; hops; durian; bananas; natural rubber plants; and ornamentals (such as flowers, shrubs, broad-leaved trees or evergreens, for example conifers). This list does not represent any limitation.

[0193] Particularly, the crop plant is monocotyledonous plant. More suitably, the crop plant is a cereal, in particular wheat or barley. In particular, the crop plant is a rice plant, more particularly, a sugar cane plant. Still, more particularly, the crop plant is a corn plant.

[0194] For example, the crop plant can be a monocot plant or a member of the family Poaceae, such as wheat plant, maize plant, sweet corn plant, rice plant, wild rice plant, barley plant, rye, millet plant, sorghum plant, sugar cane plant, turfgrass plant, bamboo plant, oat plant, brume-grass plant, Miscanthus plant, pampas grass plant, switchgrass (Panicum) plant, and/or teosinte plant; or is a member of the family Alliaceae, such as onion plant, leek plant, or garlic plant.

[0195] For example, the crop plant may be a dicot plant or a member of the family Amaranthaceae, such as spinach plant, quinoa plant; a member of the family Anacardiaceae, such as mango plant; a member of the family Asteraceae, such as sunflower plant, endive plant, lettuce plant, artichoke plant; a member of the family Brassicaceae, such as Arabidopsis thaliana plant, rape plant, oilseed rape plant, broccoli plant, Brussels sprouts plant, cabbage plant, canola plant, cauliflower plant, kohlrabi plant, turnip plant, radish plant; a member of the family Bromeliaceae, such as pineapple plant; a member of the family Caricaceae, such as papaya plant; a member of the family Chenopodiaceae, such as beet plant; a member of the family Curcurbitaceae, such as melon plant, cantaloupe plant, squash plant, watermelon plant, honeydew plant, cucumber plant, pumpkin plant; a member of the family Dioscoreaceae, such as yam plant; a member of the family Ericaceae, such as blueberry plant; a member of the family Euphorbiaceae, such as cassava plant; a member of the family Fabaceae, such as alfalfa plant, clover plant, peanut plant; a member of the family Grossulariaceae, such as currant plant; a member of the family Juglandaceae, such as walnut plant; a member of the family Lamiaceae, such as mint plant; a member of the family Lauraceae, such as avocado plant; a member of the family Leguminosae, such as soybean plant, bean plant, pea plant; a member of the family Malvaceae, such as cotton plant; a member of the family Marantaceae, such as arrowroot plant; a member of the family Myrtaceae, such as guava plant, eucalyptus plant; a member of the family Rosaceae, such as peach plant, apple plant, cherry plant, plum plant, pear plant, prune plant, blackberry plant, raspberry plant, strawberry plant; a member of the family Rubiaceae, such as coffee plant; a member of the family Rutaceae, such as citrus plant, orange plant, lemon plant, grapefruit plant, tangerine plant; a member of the family Salicaceae, such as poplar plant, willow plant; a member of the family Solanaceae, such as potato plant, sweet potato plant, tomato plant, Capsicum plant, tobacco plant, tomatillo plant, eggplant plant, Atropa belladona plant, Datura stramonium plant; a member of the family Vitaceae, such as grape plant; a member of the family Umbelliferae, such as carrot plant; or a member of the family Musaceae, such as banana plant; or wherein the plant is a member of the family Pinaceae, such as cedar plant, fir plant, hemlock plant, larch plant, pine plant, or spruce plant.

[0196] Particularly, the crop plant is selected from: soybean, tomato, melon, maize, sugarcane, canola, broccoli, cabbage, cauliflower, pepper, oilseed rape, sugarbeet, celery, squash, spinach, cucumber, watermelon, zucchini, common bean, wheat, barley, sweet corn, sunflower, rice.

[0197] Particularly, the crop plants are dicotyledonous plants. In one embodiment, the crop plants are cereals or soybean. In one embodiment, the crop plants are selected from the group consisting of summer barley, winter rye and soybean. More particularly, the crop plant is soybean. More particularly, the soybean is an elite line of soybean.

[0198] An “elite line” or “elite strain” is an agronomically superior line that has resulted from many cycles of breeding and selection for superior agronomic performance. Numerous elite lines are available and known to those of skill in the art of soybean breeding. An “elite population” is an assortment of elite individuals or lines that can be used to represent the state of the art in terms of agronomically superior genotypes of a given crop species, such as soybean. Similarly, an “elite germplasm” or elite strain of germplasm is an agronomically superior germplasm, typically derived from and/or capable of giving rise to a plant with superior agronomic performance, such as an existing or newly developed elite line of soybean.

[0199] An elite plant is any plant from an elite line, such that an elite plant is a representative plant from an elite variety. Non-limiting examples of elite soybean varieties that are commercially available to farmers or soybean breeders include: AG00802, A0868, AG0902, A1923, AG2403, A2824, A3704, A4324, A5404, AG5903, AG6202 AG0934; AG1435; AG2031; AG2035; AG2433; AG2733; AG2933; AG3334; AG3832; AG4135; AG4632; AG4934; AG5831; AG6534; and AG7231 (Asgrow Seeds, Des Moines, Iowa, USA); BPRO144RR, BPR 4077NRR and BPR 4390NRR (Bio Plant Research, Camp Point, Ill., USA); DKB17-51 and DKB37-51 (DeKalb Genetics, DeKalb, Ill., USA); DP 4546 RR, and DP 7870 RR (Delta & Pine Land Company, Lubbock, Tex., USA); JG 03R501, JG 32R606C ADD and JG 55R503C (JGL Inc., Greencastle, Ind., USA); NKS 13-K2 (NK Division of Syngenta Seeds, Golden Valley, Minnesota, USA); 90M01, 91M30, 92M33; 93M11, 94M30, 95M30, 97B52, P008T22R2; PI6T17R2; P22T69R; P25T51R; P34T07R2; P35T58R; P39T67R; P47T36R; P46T21R; and P56T03R2 (Pioneer Hi-Bred International, Johnston, Iowa, USA); SG4771NRR and SG5161NRR/STS (Soygenetics, LLC, Lafayette, Ind., USA); 500-K5, S11-L2, 528-Y2, 543-B1_{;} 553-Al, 576-L9_{;} 578-G6_{;} 50009-M2; S007-Y4; 504-D3; 514-A6; 520-T6; 521-M7; 526-P3; 528-N6; 530-V6; 535-C3; 536-Y6; 539-C4; S47-K5; 548-D9; 552-Y2; 558-Z4; 567-R6; S73-S8; and 578-G6 (Syngenta Seeds, Henderson, Ky., USA); Richer (Northstar Seed Ltd. Alberta, Calif.); 14RD62 (Stine Seed Co. Ia., USA); or Armor 4744 (Armor Seed, LLC, Ar., USA).

[0200] The terms “agronomically elite” as used herein, means a genotype that has a culmination of many distinguishable traits such as emergence, vigor, vegetative vigor, disease resistance, seed set, standability, yield and threshability which allows a producer to harvest a product of commercial significance.

[0201] The expression “commercially significant yield” means a yield of grain having commercial significance to the grower represented by an actual grain yield of 103% of the check lines AG2703 and DKB23-51 when grown under the same conditions.

[0202] In contrast, an “exotic soybean strain” or an “exotic soybean germplasm” is a strain or germplasm derived from a soybean not belonging to an available elite soybean line or strain of germplasm. In the context of a cross between two soybean plants or strains of germplasm, an exotic germplasm is not closely related by descent to the elite germplasm with which it is crossed. Most commonly, the exotic germplasm is not derived from any known elite line of soybean, but rather is selected to introduce novel genetic elements (typically novel alleles) into a breeding program.

[0203] The term “hilum” defines the point at which the soybean seed attaches to the pod. Varieties differ in hilum colour and can be yellow (Y), imperfect yellow (IY), grey (GR), buff (BF), brown (BR), black (BL) or imperfect black (IBL). Yellow hilum soybeans are generally the preferred type for the export market. Particularly, Hilum discolouration may occur on the imperfect yellow (IY) varieties. Affected beans may not be acceptable for export markets.

[0204] The term “disease-resistant” encompasses resistance to biotic stresses (e.g. diseases or pests), or abiotic stresses (e.g. environmental conditions).

[0205] The term “disease-resistant” as used in the present context, means a plant as defined that is resistant to any one of the following diseases selected from the group consisting of: nematode, bacteria or viruses such as: rust, smut, Golovinomyces cichoracearurn, Erysiphe cichoracearum, Blumeria graminis, Podosphaera xanthii, Sphaerotheca fuliginea, Pythium ultimum, Uncinula necator, Mycosphaereila pinodes, Magnaporthe grisea, Bipolaris oryzae, Magnaporthe grisea, Rhizoctonia solani, Phytophthora sojae, Schizaphis graminum, Bemisia tabaci, Rhopalosiphum maidis, Deroceras reticulaturn, Diatraea saccharalis, Schizaphis graminurn, Phakopsora pachyrhizi, and Myzus persicae; or a combination thereof. Resistance against particular diseases such as the following are encompassed within the present invention: powdery mildew, pythiu ultimum, root rot, leaf spot, blast, brown spot, leaf and neck blast, sheath blight; schizaphis graminum; brown-stem rot; soybean cyst nematode; or pests such as: whitefly, aphid, gery field slug, sugarcane borer, green bug, or aphid.

[0206] Diseases affecting curcubitacea include closteroviruses, particularly, the dosterovirus is Beet Pseudo-Yellows Virus (BPYV) or Cucurbit Yellow Stunting Disorder Virus (CYSDV),

[0207] The term “disease-resistant” also encompasses a plant that is more resistant to abiotic stresses such as: drought, flooding/excess water, high level of salinity, heavy metal, aluminum, manganese, cadmium, zinc, sunlight (e.g. UV-B), boron, hot/cold extreme temperatures, herbicides or wind.

[0208] The term “hydroponic” refers to conditions wherein plants are grown using mineral nutrient solutions, in water, without soil. Terrestrial plants may be grown with their roots in the mineral solution only, or in an inert medium, such as perlite or gravel. Nitrogen (N), phosphorus (P), and potassium (K), that are essential to all plant growth and trace elements such as: sulphur, iron, manganese, zinc, copper, boron, magnesium, calcium, chlorine, and molybdenum. For example, physical conditions corresponding to hydroponic culture may be: aeroponics, static solution, continuous flow, fogponics, passive sub-irrigation, ebb and flow or flood and drain sub-irrigation, run to waste, deep water culture, top-fed deep water culture, or rotary. Substrates often used for hydroponics include, without being limited thereto: expanded clay aggregate, growstones, peat, rice husks, vermiculite, pumice, sand, gravel, wood fiber, sheep wool, rock wool, brick shards, or polystyrene packing peanuts.

[0209] Particularly, hydroponic conditions suitable for growth of soybean plants are described in: “Hydroponic Growth and the Nondestructive Assay for Dinitrogen Fixation” by John Imsande and Edward J. Ralston. Plant Physiol. (1981) 68, 1380-1384. More particularly, the soybean hydroponic culture conditions in greenhouse can comprise nutrient solution compositions based on Imsande and Ralston 1981 as is, or with a few modifications:

[0210] SOLUTION A: Preparation of 20 L of 30× solution for macronutrients (2 L/60 L)

| Macronutrients | (g/20 L) 30X | (mg/L) 1X |
|---|---|---|
| K₂HPO₄ | 10.4 | 17.4 |
| KNO₃ | 60.6 | 101 |
| KCl | 87.3 | 221 |
| CaCL₂ | 141 | 235 |
| MgCl₂•6H₂O | 87 | 145 |
| MgSO₄•7H₂O | 150 | 250 |

[0211] SOLUTION B: Preparation of 500 ml of 5000× solution for micronutrients (12 ml60 L)

| Micronutrients | (g) |
|---|---|
| H₃BO₃ | 0.7 |
| MnSO₄•H₂O | 0.75 |
| ZnSO₄•7H₂O | 0.5 |
| CuSO₄•5H₂O | 0.5 |
| Na₂MoO₄•2H₂O | 0.375 |
| Co(NO₃)2•6H₂O | 0.125 |

[0212] SOLUTION C: Preparation of 1 L of 3000× FeNa EDTA solution (19.8 ml60 L) FeNa EDTA (13.2% Fe)45 g

[0213] SOLUTION D: Kasil 6: Preparation of 200 L of 1× silicon solution (76 g/200 L)

| | |
|---|---|
| KASIL 6 | 22.8 g/60 L |
| HCl 5N | pH 6.5 with supplementary fertilization 2 weeks after planting |

[0214] SOLUTION E: Preparation of 20 L of 30× solution for N and P (2 L/60 L)

| Salt | (g) |
|---|---|
| NH₄H₂PO₄ | 36 |
| NH₄NO₃ | 120 |

[0215] As used herein, the term “promoter” or “promoter sequence” means a region of DNA or DNA sequence that initiates transcription of a particular gene. Promoters are located near the transcription start sites of genes, on the same strand and upstream on the DNA (towards the 5′ region of the sense strand). Promoters can be about 100-1000 base pairs long. It is understood that that genomic sequences spanning 1000 to 5000 base pairs upstream from the native gene start codon can be utilized as a promoter to initiate gene transcription of the respective gene.

[0216] As used herein, the “native” as in “native promoter” refers to a promoter that is naturally and/or originally present in a cell and it is typically designated for the expression of a particular gene. In one embodiment, “native promoter” is encoded in the natural original genome of the cell. In one embodiment, no extra ordinary measures have been taken by another organism to insert the promoter artificially into the cell. As used herein, “the native response element (RE)” or the “native promoter (RE)” refers to the RE that is naturally present in the promoter DNA sequence. For example, the human apolipoprotein C3 (ApoC3) gene is expressed from a HNF4 alpha (HNF4A) transcription factor dependent ApoC3 promoter which has two REs for HNF4A. The two REs for HNF4A (H4RE) are the native RE of the ApoC3 promoter. Likewise, the hepatocyte nuclear factor 1 alpha (HNF1A) transcription factor dependent human HNF4A P2 promoter has one RE for HNF1alpha (H1RE). The HIRE in the native RE of the human HNF4A P2 promoter.

[0217] A “non-native promoter” would be a promoter not originally present in a cell and that has been inserted artificially into the cell. In one embodiment, a non-native promoter of a gene is one that that is not naturally associated with the gene. For example, the mouse hepatocyte nuclear factor la Dup4xH4RE (Hnf1 α.sup.Dup4×H4RE) promoter was operably linked with a human hepatocyte nuclear factor 1 alpha (HNF1 alpha) cDNA. The Hnf1 a.sup.Dup4×H4RE is a non-native promoter.

### Detailed Description of Particular Embodiments

### Novel Chromosomal Interval of Glycine max

[0218] In accordance with a particular embodiment of the invention, there is provided a novel genomic region found responsible for the increased Si uptake in soybean which was found on chromosome 16 spanning from 92.6 cM to 132 cM, more particularly from 94.9 cM to 101.6 cM distance on Hikmok sorip genetic linkage map.

[0219] More particularly, the chromosomal interval comprises any one of, or a portion of: nucleotide base pair corresponding to positions: 1-2658341 of SEQ ID NO: 1; 567613-569933 of SEQ ID NO: 1; 564321-567612 of SEQ ID NO: 1; 577172-579696 of SEQ ID NO: 1; or 573723-577171 of SEQ ID NO: 1. Most particularly, the chromosome interval comprises at least one single nucleotide polymorphism (SNP) selected from the group consisting of: A(33673022), G(33673483), C(33681630), T(33682500), G(33683047), and C(33683049) of Glyma16g:30000 or Gly a 6g:30020 genes wherein presence of the SNP is associated with Si accumulation.

[0220] In accordance with a particular embodiment of the invention, the chromosomal interval comprises SEQ ID NO: 14 or 16. Particularly, the chromosomal interval comprises SEQ ID NO.14 or 16 or a portion thereof providing increased silicon uptake in a plant. Particularly, this chromosomal interval is derived from Hikmok sorip soybean variety.

[0221] According to a particular embodiment, the invention provides a chromosomal interval or genomic region that comprises a nucleic acid of SEQ ID NO: 16 or a nucleic acid encoding a polypeptide with an amino acid sequence comprising SEQ ID NO 17, where the polypeptide comprises at least one amino acid corresponding to a histidine at position 322 or a glycine at position 431.

[0222] According to a particular embodiment, the invention provides a chromosomal interval or genomic region comprises the nucleic acid is SEQ ID NO: 14, or a nucleic acid encoding a polypeptide with an amino acid sequence comprising SEQ ID NO 15, where the polypeptide comprises at least one amino acid corresponding to a proline at position 5, a isoleucine at position 295 or a valine at position 439.

[0223] Particularly, the chromosomal interval is derived from a black hilum soybean variety. More particularly, the nucleic acid is derived from a black hilum soybean variety having high Si uptake, particularly the Hikmok sorip variety.

### Plants

[0224] In accordance with a particular aspect, the present invention provides a HiSil plant wherein the plant comprises in its genome a chromosomal interval comprising the H1 haplotype. In particular, the resulting plant is a high Si accumulator as compared to a control plant not comprising the nucleic acid corresponding to the Hi haplotype.

[0225] In accordance with an alternative aspect, the present invention provides a HiSil plant which comprises in its genome a chromosomal interval associated with Si accumulation corresponding to a genomic region or portion thereof from Hikmok sorip chromosome 16 at about 92.6 cM to about 132 cM distance as indicated on a genetic linkage map from Hikmok sorip (PI372415A). Particularly, wherein the plant is an elite soybean (Glycine max) plant.

[0226] According to an alternative embodiment, there is provided a HiSil plant which comprises in its genome a chromosomal interval associated with Si accumulation corresponding to a genomic region or portion thereof from Hikmok sorip chromosome 16 corresponding to physical positions 31.15M base-pairs to 36.72 M base-pairs of Williams82 reference genome.

[0227] Therefore, a further aspect of the invention provides a plant having high Si uptake, the plant having introduced into its genome a nucleic acid sequence encoding a HiSil protein as defined by SEQ ID: 15 or 17.

[0228] Particularly, the plant comprises a genomic region introduced into its genome comprising any one of SEQ ID NO: 14, 16 or 18. Particularly, wherein the plant is an elite soybean (Glycine max) plant.

[0229] According to a particular embodiment, the invention provides a plant having a chromosomal interval or genomic region that comprises a nucleic acid of SEQ ID NO: 16 or a nucleic acid encoding a polypeptide with an amino acid sequence comprising SEQ ID NO 17, where the polypeptide comprises at least one amino acid corresponding to a histidine at position 322 or a glycine at position 431.

[0230] According to a particular embodiment, the invention provides a plant having a chromosomal interval or genomic region comprises the nucleic acid is SEQ ID NO: 14, or a nucleic acid encoding a polypeptide with an amino acid sequence comprising SEQ ID NO 15, where the polypeptide comprises at least one amino acid corresponding to a proline at position 5, a isoleucine at position 295 or a valine at position 439.

[0231] Particularly, the plant comprises a molecular marker associated with increased Si uptake capable of being amplified and identified with the primer sequences as defined herein. More particularly, the plant comprises a marker capable being amplified and identified with the following sequences: SEQ ID NO. 12, 13 and 278-495. In another instance, the plant is capable of producing an amplicon when amplified with the following sequences: SEQ ID NO, 12, 13 and 278-495.

[0232] In particular embodiment, the plant is a Glycine max (i.e. soybean) plant. Particularly, the Glycine max plant is an elite Glycine max plant. More particularly, the elite Glycine max plant comprises a HiSil trait.

[0233] In accordance with a particular embodiment, the present invention provides an elite HiSil Glycine max plant that comprises in its genome a H1 haplotype chromosomal interval. In one aspect the H1 haplotype is derived from Hikmok sorip or a progeny thereof.

[0234] According to an alternative embodiment, there is provided an elite HiSil Glycine max plant wherein the elite HiSil Glycine max plant comprises in its genome a chromosomal interval associated with Si accumulation corresponding to a genomic region or portion thereof from Hikmok sorip chromosome 16 at about 92.6 cM to about 132 cM distance as indicated on a genetic linkage map from Hikmok sorip (PI372415A).

[0235] In accordance with a particular embodiment, the invention provides an elite HiSil Glycine max plant wherein the elite HiSil Glycine max plant comprises in its genome a chromosomal interval associated with Si accumulation corresponding to a genomic region or portion thereof from Hikmok sorip chromosome 16 corresponding to physical positions 31.15M base-pairs to 36.72 M base-pairs of Williams82 reference genome.

[0236] In particular embodiment, when the plant is an elite Glycine max plant, it is a commercially elite Glycine max variety having a commercially significant yield. More particularly, the plant is an agronomically elite Glycine max.

[0237] In accordance with a particular embodiment, the chromosomal interval of the plant is derived from any one of the plant lines selected from the group consisting of: PI372415A, PI209332, PI404166, PI437655, PI89772, PI372415A or PI90763.

[0238] In accordance with a particular embodiment, the plant has improved agronomical traits such as seedling vigor, yield potential, phosphate uptake, plant growth, seedling growth, phosphorus uptake, lodging, reproductive growth, or grain quality.

[0239] A particular aspect of the invention provides a plant having introduced into its genome a nucleic acid sequence encoding a HiSil protein wherein introduction into the genome confers increased Si accumulation in the plant as compared to a control plant not comprising the nucleic acid sequence encoding a HiSil protein.

[0240] Most particularly, plants having the H1 haplotype introduced therein are hereby encompassed within the present invention, particularly those comprising the H1 haplotypes for the coding sequences of Glyma16g30000 and Glyma16g30020HiSil gene. Particularly, the H1 haplotype is defined by an nucleic acid allelic profile selected from the group consisting of: G (33672717), A(33673022), G(33673483), C(33681630), T(33681946), T(33681961), T(33682500), G(33683047), and C(33683049). Alternatively, the molecular marker associated with high Si uptake is located within HiSil region genes, and can be defined by a nucleic acid selected from the group consisting of: A(33673022), G(33673483), C(33681630), T(33682500), G(33683047), and C(33683049) of genes Glyma16g:30000 or Glyma16g:30020.

[0241] Particularly, the H1 haplotype is defined by an amino acid profile selected from the group consisting of: having at least 80% sequence identity to SEQ ID NO: 17 where the polypeptide further comprises at least one amino acid corresponding to a histidine at position 322 or a glycine at position 431. Particularly, the H1 haplotype is defined by an amino acid profile selected from the group consisting of: having at least 80% sequence identity to SEQ ID NO: 15, wherein the protein comprises a proline at position 5, an isoleucine at position 295 or a valine at position 439.

[0242] In one embodiment of the invention, it is envisioned that gene homologs within the soybean genome may be modified or introduced through a HiSil plant source (e.g. Hikmok sorip) to create plants having increased Si uptake and/or accumulation. For example coding sequences Glyma09G24930; Glyma09G24943 and Glyma09G24956 (collectively, “Soy Chr9 HiSil homologs”) may be modified to comprise a H1 haplotype and/or comprise a allelic modification corresponding to a G (33672717), A(33673022), G(33673483), 0(33681630), 1(33681946), T(33681961), T(33682500), G(33683047), or a C(33683049), In another instance, not to be limited by theory, any one of the “Soy Chr9 HiSil homologs may be expressed transgenically to create HiSil plants. Alternatively, a elite soybean plant comprising a chromosome interval comprising any on the the “Soy Chr9 HiSil homologs” derived from a HiSil Source (e.g. Hikmok sorip) wherein said introduction of the chromosome interval confers increased Si uptake and/or accumulation , is contemplated. A elite soybean plant comprising in its genome, a chromosome interval comprising any one of Glyma09G24930; Glyma09G24943 or Glyma09G24956 wherein said interval confers increased Si uptake and/or accumulation as compared to a control plant. Further contemplated are methods of identifying or selecting a HiSil plant by detecting in a plant genome a marker associated with the presence of any one of the genes selected from the group consisting of Glyma09G24930; Glyma09G24943 and Glyma09G24956 wherein the presence of said gene is associated with increased Si uptake and/or accumulation.

[0243] According to a particular embodiment, the invention provides a plant having introduced into its genome a nucleic acid sequence encoding a protein having 60%, 70%, 80%, 90%, 95%, or 99% sequence identity to any one of SEQ ID NO. 15 or SEQ ID NO. 17. More particularly, the protein comprises, or consists of: SEQ ID NO. 15 or SEQ ID NO, 17.

[0244] Particularly, the protein is a functional Si transporter that facilitates Si uptake into the plant. More particularly, the protein confers Si accumulation in any one of the plant leaves, plant stem or plant parts. Most particularly, the protein is active in the plant's roots.

[0245] More particularly, the nucleic acid sequence comprises any one of SEQ ID NOs: 14 and 16. Alternatively, the nucleic acid is derived from a Glycine sp. plant having high silicon uptake. Still, particularly, the nucleic acid is derived from a black hilum soybean variety (e.g. Hikmok sorip) having high Si uptake.

[0246] Alternatively, at least two nucleic acid sequences are introduced into the plant's genome, where the two nucleic acid sequences encode proteins comprising a polypeptide sequence comprising SEQ ID NO: 15 and SEQ ID NO: 17.

[0247] Still, particularly the invention provides an elite HiSil Glycine max plant comprising a HiSil allele which confers increased Si uptake, and wherein the HiSil allele comprises at least one single nucleotide polymorphism (SNP) selected from the group consisting of A(33673022), G(33673483), C(33681630), T(33682500), G(33683047), and C(33683049) as indicated on a genetic linkage map from Hikmok sorip (PI372415A).

### Progeny, Plant Parts, Seeds and Cells

[0248] A particular embodiment of the invention provides a plant comprising, or having introduced into its genome, a nucleic acid sequence encoding a HiSil protein wherein introduction into the genome confers increased Si accumulation in the plant as compared to a control plant not comprising the nucleic acid sequence encoding a HiSil protein.

[0249] In a particular embodiment, there is provided a progeny plant produced from, or derived from, the plant as defined herein. More particularly, there is provided a plant cell, plant seed or plant part derived from the plant as defined herein.

[0250] Particularly, in accordance with all aspects of the invention, the term “plant” means that it comprises any plant part (such as roots, leaves, stock, etc.), seed, or a tissue culture thereof. More particularly, it comprises cells of a plant, seeds from the plant, cells of a seed, or a tissue culture thereof.

[0251] In accordance with a further aspect of the invention there is provided a seed for producing the plant as defined herein. Alternatively, the plant comes from the plant itself.

[0252] According to a particular embodiment, the plant is a monocot or dicot.

### Crops/Soybean

[0253] Particularly, the plants are dicotyledonous plants, such as a crop plant. In one embodiment, the crop plant is a cereal or soybean. In one embodiment, the crop plants are selected from the group consisting of summer barley, winter rye and soybean. More particularly, the crop plant is soybean. More particularly, the soybean is an elite line of soybean, most particularly, an agronomically elite Glycine max,

[0254] Particularly, in accordance with an embodiment of the invention, there is provided an elite soybean plant comprising a nucleic acid sequence that encodes a protein having at least 80% sequence identity to SEQ ID NO: 15 or SEQ ID NO: 17, wherein the protein comprises an Isoleucine at a position corresponding to position 295 of SEQ ID NO:15,

[0255] Particularly, in accordance with an embodiment of the invention, the plant is a soybean plant and is not Hikmok sorip (Pl372415A), More particularly, the plant is of a soybean variety or lineage having high Si uptake, provided that the variety is not Hikmok sorip.

[0256] In accordance with a particular embodiment, the invention provides a method of increasing yield in a soybean crop, the method comprising the steps of: planting in a field a soybean plant as described herein; and ensuring that the plant is provided with a supply of Si at a concentration of at least about 0.8 mM.

[0257] According to a particular embodiment, the invention provides a method of growing a soybean crop, the method comprising the steps of: planting in a field a soybean plant as described herein; and applying a compound to the field that comprises silicon: prior to planting, at planting, or after planting.

[0258] In accordance with a particular embodiment, the invention provides a method of growing a soybean crop, the method comprising planting in a field a soybean plant as described herein, wherein the soil of the field comprises silicon at the level of at least about 0.8 mM.

### Soybean Parent Variety

[0259] In accordance with particular aspects of the invention, the soybean variety having low Si uptake (i.e. “low” meaning “normal” or “average” in this instance) is selected from any soybean variety not containing a molecular marker associated with the HiSil trait (e.g. any marker from Tables 15-20)

[0260] In accordance with particular aspects of the invention, the soybean variety having high Si uptake has higher Si uptake such as found in the Hikmok sorip or any other line containing the marker conferring high Si uptake. More particularly, lines, varieties or alleles carrying the H1 haplotype can be used as rootstock for grafting. In an embodiment of the invention, a plant having grafted onto it a plant part comprising the HiSil trait (e.g. the H1 haplotype or any molecular marker from Tables 15-20).

### Hilum Color Varieties

[0261] Particularly, the exotic soybean variety having high Si uptake is derived from a black hilum soybean variety, the Hikmok sorip variety.The hilum is the point at which the soybean seed attaches to the pod. Varieties differ inhilum colour and can be yellow (Y), imperfect yellow (IY), grey (GR), buff (BF), brown (BR), black (BL) or imperfect black (IBL). Hilum discolouration may occur on the imperfect yellow (IY) varieties. Particularly, Yellow hilum soybeans are generally the preferred type for the export market.

### Other Plants

[0262] In a particular aspect, the plant is selected from the group consisting of soybean, tomato, melon, maize, sugarcane, canola, broccoli, cabbage, cauliflower, pepper, oilseed rape, sugarbeet, celery, squash, spinach, cucumber, watermelon, zucchini, common bean, wheat, barley, sweet corn, sunflower, rice. Si concentrations found in plants

[0263] In accordance with a particular embodiment of the invention, there is provided a plant capable of accumulating Si in leaf tissue at a concentration of at least 1% Si concentration when plants are provided with a supply of Si at a concentration of at least about 0.4 mM to about 0.8mM under hydroponic conditions. According to a particular embodiment, the plant has a leaf Si concentration of at least around one point two (1.2×), one and a half (1.5×), double (2×), or triple (3×) the concentration of a control plant not comprising the genomic region. Still, particularly, the plant has increased Si accumulation in any one of its plant leaves, plant stem or plant parts as compared to a LoSil plant. More particularly, the plant has at least 1.1×, 1.2×, 1.5×, 2×, 3' or higher Si accumulation compared to a LoSil plant.

[0264] According to a particular embodiment, the plant comprises a silicon concentration of at least 1% Si concentration in its leaves when it is provided with a supply of Si at a concentration of about 0.8 mM under hydroponic conditions. More particularly, the plant has a leaf Si concentration of at least about double (2×) as compared to a control (LoSil) plant.

[0265] Particularly, in accordance with the different aspects of the invention, plants, particularly soybean plants, having a high Si uptake are defined as having above 1%, 1.1%; 1.2%; 1.3%; 1.4%; 1.5% or 1.6% Si concentration in the leaves when the plants are provided with a sufficient supply of Si. Particularly, a sufficient supply of Si is defined at a concentration of at least about 0.8 mM Si in the potting soil or feeding solution. More particularly, high Si uptake may be defined as a plant having between 1.1% and 3% Si concentration in the leaves; most particularly: between 1.5% and 2.75% Si concentration in the leaves.

### Disease Resistance

[0266] In accordance with a particular aspect of the invention, there si also provided a plant having increased resistance to a stress, particularly: a biotic stress or an abiotic stress.

[0267] In a further aspect of the invention, the plant having high Si uptake is more resistant to a wide variety of diseases, pests and stresses. Benefits of silicon (Si) uptake to crop culture are widely accepted and a reported concept in the agricultural community. There are over a thousand scientific publications describing the beneficial role of Si for plant health, more specifically for biotic and abiotic stress tolerance (Tables 1-4). Si-derived benefits have arguably been most commonly associated with disease resistance.

[0268] More particularly, the stress is: a) a disease selected from: such as powdery mildew, Pythium ultimum, Phytophthora root rot, leaf spot, blast, brown spot, root-knot nematode, soybean cyst nematode, soybean vein necrosis virus, soybean stem canker, soybean sudden death syndrome, leaf and neck blast, rust, frogeye leaf spot, brown stem rot, Fusarium, or sheath blight); b) an insect pest such as whitefly, aphid, grey field slug, sugarcane borer, green bug, or aphid); or c) an abiotic stress such as drought tolerance, flooding, high level of salinity, heavy metal, aluminum, manganese, cadmium, zinc, UV-B, boron, iron deficiency chlorosis or cold tolerance (i.e. extreme temperatures).

[0269] Particularly, the following diseases are found in soybean crops: Asian soybean rust, soy cyst nematode, nematode, rust, smut, Golovinomyces cichoracearum, Erysiphe dchoracearum, Blumeria graminis, Podosphaera xanthii, Sphaerotheca fuliginea, Pythium ultirnurn, Uncinula necator, Mycosphaerella pinodes, Magnaporthe grisea, Bipolaris oryzae, Magnaporthe grisea, Rhizoctonia solani, Phytophthora sojae. Schizaphis graminum, Bemisia tabaci, Rhopalosiphum maidis, Deroceras reticulatum, Diatraea saccharalis, Schizaphis graminum and Myzus persicae.

[0270] In a particular embodiment of the invention, there is provided a method for increasing resistace to a disease in a plant, comprising the steps of: planting in a field a plant as described herein; and ensuring that the plant is provided with a supply of Si at a concentration of at least about 0.8 mM.

[0271] In a particular embodiment of the invention, there is provided a method of reducing abiotic stress damage in a crop wherein the abiotic stress is caused by any one of the following: drought, flooding/excess water, high level of salinity, heavy metal, aluminum, manganese, cadmium, zinc, UV-B, boron, cold temperature, heat, or herbicide, the method comprising the steps of: planting in a field a plant as described herein; and ensuring that the plant is provided with a supply of Si at a concentration of at least about 0.8 mM.

[0272] Resistance against diseases such as the following are encompassed within the present invention: powdery mildew, pythiu ultimum, root rot, leaf spot, blast, brown spot, leaf and neck blast, sheath blight; schizaphis graminum; brown-stem rot; soybean cyst nematode; and root-knot nematode. As well, resistance against pests such as the following are encompassed within the present invention: whitefly, aphid, gery field slug, sugarcane borer, green bug, or aphid.

[0273] Resistance against biotic and abiotic stresses such as the following are also encompassed within the present invention: salt (salinity), drought, aluminum, manganese, cadmium, zinc, UV-B, boron or cold (i.e. extreme temperatures).

[0274] In most cases, the beneficial role of Si will be more manifest in plant species accumulating higher amounts of Si, such as members of the grass family. In the case of rice for instance, Si amendments were found to enhance resistance against diseases such as blast, brown spot, and sheath blight (Table 1). The prophylactic effects of Si against insect pests have also been observed in several studies (Table 2). Sugarcane is another high Si accumulator and for which many positive effects have been observed under Si fertilization (Table 2). Similarly, enhancement of resistance against different insect pests has been reported in maize, rice, wheat, and cucumber, particularly, a closterovirus that may be Beet Pseudo-Yellows Virus (BPYV) or Cucurbit Yellow Stunting Disorder Virus (CYSDV).

[0275] Abiotic stress tolerance is a major constrain in crop yield production including soybean. Drought imposed by a water limiting environment, flooding, high level of salinity and heavy metal stress are the major concerns of abiotic stress. Si application has shown a great level of yield improvement against these stresses in different plant species (Table 3).

[0276] In addition to improving biotic and abiotic stress resistance, Si application has been reported to improve several agronomical traits. Increase in seedling vigor, yield potential and phosphate uptake has been observed with Si application in rice (Table 4).

[0277] Agronomical traits improved by high Si uptake are also encompassed within the present invention may be selected from, amongst others: plant growth, yield, seedling growth, phosphorus uptake, lodging, reproductive growth, or grain quality.

TABLE 1
Details of experimental evidence provided in the reports demonstrating the beneficial effects of silicon amendment on the
disease resistance in different plant species

| Table 1. | | | |
|---|---|---|---|
| Crop | Disease resistance | Reference | Title of the article |
| Arabidopsis | Powdery mildew | Vivancos et al. 2015 | Silicon-mediated resistance of Arabidopsis |
| (transgenic) | (Golovinomyces cichoracearum) | | against powdery mildew involves mechanisms |
| | | | other than the salicylic acid (SA)-dependent |
| | | | defence pathway |
| Arabidopsis | Powdery mildew (Erysiphe | Ghanmi et al. 2004 | Powdery mildew of Arabidopsis thaliana: a |
| | cichoracearum) | | pathosystem for exploring the role of silicon in |
| | | | plant-microbe interactions |
| Barley (Hordeum vulgare) | Powdery mildew (Blumeria graminis) | Wiese et al. 2005 | Osmotic stress and silicon act additively in |
| | | | enhancing pathogen resistance in barley against |
| | | | barley powdery mildew |
| Barley (Hordeum vulgare) | Powdery mildew (Blumeria graminis) | Riciout et al. 2006 | Multiple avirulence paralogues in cereal powdery |
| | | | mildew fungi may contribute to parasite fitness |
| | | | and defeat of plant resistance |
| Cucumber (Cucumis | Powdery mildew (Podosphaera | Liang et al. 2005 | Effects of foliar-and root-applied silicon on the |
| sativus) | xanthii) | | enhancement of induced resistance to powdery |
| | | | mildew in Cucumis sativus |
| Cucumber (Cucumis | Powdery mildew (Sphaerotheca | Wei et al. 2004 | Effects of silicon supply and Sphaerotheca |
| sativus) | fuliginea) | | fuliginea inoculation on resistance of cucumber |
| | | | seedlings against powdery mildew |
| Cucumber (Cucumis | Powdery mildew (Sphaerotheca | Menzies et al. 1991 | The influence of silicon on cytological |
| sativus) | fuliginea) | | interactions between Sphaerotheca fuliginea |
| | | | and Cucumis sativus |
| Cucumber (Cucumis | Pythium ultimum | Chérif et al. 1992 | Silicon induced resistance in cucumber plants |
| sativus) | | | against Pythium ultimum |
| Cucumber (Cucumis | Root rot (Pythium ultimum) | Chérif et al. 1994 | Defense responses induced by soluble silicon in |
| sativus) | | | cucumber roots infected by Pythium spp |
| Grape (Vitis vinifera) | Powdery mildew (Uncinula necator) | Bowen et al. 1992 | Soluble silicon sprays inhibit powdery mildew |
| | | | development on grape leaves |
| Oat (Avena sativa) | Powdery mildew (Blumeria graminis) | Carver et al. 1998 | Silicon deprivation enhances localized |
| | | | autofluorescent responses and phenylalanine |
| | | | ammonia-lyase activity in oat attacked by |
| | | | Blumeria graminis |
| Oat (Avena sativa) | Powdery mildew (Blumeria graminis) | Carver et al. 1998 | Phenylalanine ammonia-lyase inhibition, |
| | | | autofluorescence, and localized accumulation of |
| | | | silicon, calcium and manganese in oat epidermis |
| | | | attacked by the powdery mildew fungus |
| Peas (Pisum sativum) | Leaf spot (Mycosphaerella pinodes) | Dann et al. 2002 | Peas grown in media with elevated plant- |
| | | | available silicon levels have higher activities of |
| | | | chitinase and β-1, 3-glucanase, are less |
| | | | susceptible to a fungal leaf spot pathogen and |
| | | | accumulate more foliar silicon |
| Rice (Oryza sativa) | Blast (Magnaporthe grisea) | Kim et al. 2002 | Silicon-induced cell wall fortification of rice |
| | | | leaves: a possible cellular mechanism of |
| | | | enhanced host resistance to blast |
| Rice (Oryza sativa) | Blast (Magnaporthe grisea) | Rodrigues et al. 2004 | Silicon enhances the accumulation of diterpenoid |
| | | | phytoalexins in rice: a potential mechanism for |
| | | | blast resistance |
| Rice (Oryza sativa) | Blast (Magnaporthe grisea) | Rodrigues et al. 2003 | Ultrastructural and cytochemical aspects of |
| | | | silicon-mediated rice blast resistance |
| Rice (Oryza sativa) | Blast (Magnaporthe grisea) | Cai et al. 2008 | Physiological and cytological mechanisms of |
| | | | silicon-induced resistance in rice against blast |
| | | | disease |
| Rice (Oryza sativa) | Blast (Magnaporthe grisea) | Seebold et al. 2001 | The influence of silicon on components of |
| | | | resistance to blast in susceptible, partially |
| | | | resistant, and resistant cultivars of rice |
| Rice (Oryza sativa) | Blast (Magnaporthe grisea) | Seebold et al. 2000 | Effect of silicon rate and host resistance on blast, |
| | | | scald, and yield of upland rice |
| Rice (Oryza sativa) | Blast (Magnaporthe grisea) | Osuna-Canizalez et al. | Nitrogen form and silicon nutrition effects on |
| | | 1991 | resistance to blast disease of rice |
| Rice (Oryza sativa) | Brown spot (Bipolaris oryzae) | Dallagnoi et al. 2009 | Defective active silicon uptake affects some |
| | | | components of rice resistance to brown spot |
| Rice (Oryza sativa) | Brown spot (Bipolaris oryzae) | Zanão Junior et al. 2009 | Rice resistance to brown spot mediated by |
| | | | silicon and its interaction with manganese |
| Rice (Oryza sativa) | Leaf and neck blast (Magnaporthe | Seebold Jr et al. 2004 | Effects of silicon and fungicides on the control of |
| | grisea) | | leaf and neck blast in upland rice |
| Rice (Oryza sativa) | Several | Winslow et al. 1992 | Silicon, disease resistance, and yield of rice |
| | | | genotypes under upland cultural conditions |
| Rice (Oryza sativa) | Several | Ranganathan et al. 2006 | Effects of silicon sources on its deposition, |
| | | | chlorophyll content, and disease and pest |
| | | | resistance in rice |
| Rice (Oryza sativa) | Sheath blight (Rhizoctonia solani) | Peters et al. 2001 | Effect of silicon and host resistance on sheath |
| | | | blight development in rice |
| Rice (Oryza sativa) | Sheath blight (Rhizoctonia solani) | Rodrigues et al. 2003 | Influence of silicon on sheath blight of rice in |
| | | | Brazil |
| Soybean (Glycine max) | Root rot (Phytophthora sojae) | Guérin et al. 2014 | A Zoospore Inoculation Method with |
| | | | Phytophthora sojae to Assess the Prophylactic |
| | | | Role of Silicon on Soybean Cultivars |
| Wheat (Triticum aestivum) | Schizaphis graminum | Gomes et al. 2005 | Resistance induction in wheat plants by silicon |
| | | | and aphids |
| Wheat (Triticum aestivum) | Powdery mildew (Blumeria graminis) | Bélanger et al. 2003 | Cytological evidence of an active role of silicon in |
| | | | wheat resistance to powdery mildew |
| Wheat (Triticum aestivum) | Powdery mildew (Blumeria graminis) | Rémus-Borel et al. 2005 | Silicon induces antifungal compounds in |
| | | | powdery mildew-infected wheat |
| Wheat (Triticum aestivum) | Powdery mildew (Blumeria graminis) | Guével et al. 2007 | Effect of root and foliar applications of soluble |
| | | | silicon on powdery mildew control and growth of |
| | | | wheat plants |
| Wheat (Triticum aestivum) | Several | Rodgers-Gray et al. 2004 | Effects of straw and silicon soil amendments on |
| | | | some foliar and stem-base diseases in |
| | | | pot-grown winter wheat |

TABLE 2
Details of experimental evidence provided in the reports demonstrating the beneficial effects of silicon amendment on the insect
resistance in different plant species

| Table 2. | | | |
|---|---|---|---|
| Crop | Insect resistance | Reference | Title of the article |
| Cucumber (Cucumis | Whitefly (Bemisia tabaci) | Correa et al. 2005 | Silicon and acibenzolar-S-methyl as resistance |
| sativus) | | | inducers in cucumber, against the whitefly Bemisia |
| | | | tabaci biotype B |
| Maize (Zea mays) | Aphid (Rhopalosiphum maidis) | Moraes et al. 2005 | Feeding non-preference of the corn leaf aphid |
| | | | Rhopalosiphum maidis to corn plants |
| Rice (Oryza sativa) | Grey field slug (Deroceras | Wadham et al. 1981 | The silicon content of Oryza sativa L |
| | reticulatum) | | |
| Sugarcane (Saccharum | Sugarcane borer (Diatraea | Anderson et al. 2001 | Effect of silicon on expression of resistance to |
| officinarum) | saccharalis) | | sugarcane borer |
| Sugarcane (Saccharum | Sugarcane borer (Diatraea | Keeping et al. 2002 | Effect of four sources of silicon on resistance of |
| officinarum) | saccharalis) | | sugarcane varieties to Eldana saccharina |
| Sugarcane (Saccharum | Sugarcane borer (Diatraea | Kvedaras et al. 2007 | Silicon impedes stalk penetration by the borer |
| officinarum) | saccharalis) | | Eldana saccharina in sugarcane |
| Sugarcane (Saccharum | Sugarcane borer (Diatraea | Kvedaras et al. 2007 | Larval performance of the pyralid borer Eldana |
| officinarum) | saccharalis) | | saccharina Walker and stalk damage in |
| | | | sugarcane: Influence of plant silicon, cultivar and |
| | | | feeding site |
| Sugarcane (Saccharum | Sugarcane borer (Diatraea | Kvedaras et al. 2005 | Effects of silicon on the African stalk borer, Eldana |
| officinarum) | saccharails) | | saccharina in sugarcane |
| Sugarcane (Saccharum | Sugarcane borer (Diatraea | Keeping et al. 2009 | Epidermal silicon in sugarcane: Cultivar |
| officinarum) | saccharails) | | differences and role in resistance to sugarcane |
| | | | borer |
| Wheat (Triticum aestivum) | Green bug (Schizaphis | Goussain et al. 2005 | Effect of silicon applied to wheat plants on the |
| | graminum) | | biology and probing behaviour of the greenbug |
| | | | Schizaphis graminum |
| Wheat (Triticum aestivum) | Green bug (Schizaphis | Moraes et al. 2004 | Silicon influence on the tritrophic interaction: |
| | graminum) | | wheat plants, the greenbug Schizaphis graminum, |
| | | | and its natural enemies, Chrysoperla externa and |
| | | | Aphidius colemani Viereck |
| Zinnia (Zinnia elegans) | Aphid (Myzus persicae) | Ranger et al. 2009 | Influence of silicon on resistance of Zinnia |
| | | | elegans to Myzus persicae |

TABLE 3
Details of experimental evidence provided in the reports demonstrating the beneficial effects of silicon amendment on the abiotic
stress tolerance in different plant species

| Table 3. | | | |
|---|---|---|---|
| Crop | Abiotic stress | Reference | Title of the article |
| Alfalfa (Medicago sativa) | Salt | Wang et al. 2007 | Effects of NaCl and silicon on ion distribution in the |
| | | | roots, shoots and leaves of two alfalfa cultivars with |
| | | | different salt t |
| Augustinegrass (Stenotaphrum | Drought | Trenholm et al. 2004 | Influence of silicon on drought and shade tolerance of |
| secundatum) | | | St. Augustinegrass |
| Barley (Hordeum vulgare) | Aluminum | Hammond et al. 1995 | Aluminium/silicon interactions in barley |
| Barley (Hordeum vulgare) | Drought | Walker et al. 1991 | Silicon accumulation and 13C composition as indices of |
| | | | water-use efficiency in barley cultivars |
| Barley (Hordeum vulgare) | Manganese | Horiguchi et al. 1987 | Mechanism of manganese toxicity and tolerance of |
| | | | plants VI. effect of silicon on alleviation of manganese |
| | | | toxicity of barley |
| Barley (Hordeum vulgare) | Salt | Liang et al. 1996 | Effects of silicon on salinity tolerance of two barley |
| | | | cultivars |
| Barley (Hordeum vulgare) | Salt | Liang et al. 1999 | Effects of silicon on enzyme activity and sodium, |
| | | | potassium and calcium concentration in barley under |
| | | | salt stress |
| Barley (Hordeum vulgare) | Salt | Liang et al. 2003 | Exogenous silicon (Si) increases antioxidant enzyme |
| | | | activity and reduces lipid peroxidation in roots of salt- |
| | | | stressed barley |
| Barley (Hordeum vulgare) | Salt | Yongchao et al. 1998 | Effect of silicon on leaf ultrastructure, chlorophyll content |
| | | | and photosynthetic activity of barley under salt stress |
| Bayahonda blanca (Prosopis | Salt | Bradbury et al. 1990 | The effect of silicon on the growth of Prosopis juliflora |
| juliflora) | | | growing in saline soil |
| Brassica | Cadmium | Song et al. 2009 | Silicon-enhanced resistance to cadmium toxicity in |
| | | | Brassica chinensis |
| Comon Bean (Phaseolus vulgaris) | Manganese | Horst et al. 1978 | Effect of silicon on manganese tolerance of bean plants |
| Cotton | Aluminum | Li et al. 1989 | Response of cotton cultivars to aluminum in solutions |
| (Gossypium Spp.) | | | with varying silicon concentrations |
| Cowpea (Vigna unguiculata) | Manganese | Iwasaki et al. 2002 | Leaf apoplastic silicon enhances manganese tolerance |
| | | | of cowpea |
| Cowpea (Vigna unguiculata) | Manganese | Iwasaki et al. 2002 | Effects of silicon supply on apoplastic manganese |
| | | | concentrations in leaves and their relation to manganese |
| | | | tolerance in cowpea |
| Cucumber (Cucumis sativus) | Cadmium | Feng et al. 2010 | Silicon supplementation ameliorated the inhibition of |
| | | | photosynthesis and nitrate metabolism by cadmium (Cd) |
| | | | toxicity in Cucum |
| Cucumber (Cucumis sativus) | Drought | Ma et al. 2004 | Effects of silicon application on drought resistance of |
| | | | Cucumber (Cucumis sativus) plants |
| Cucumber (Cucumis sativus) | Manganese | Rogalla et al. 2002 | Role of leaf apoplast in silicon-mediated manganese |
| | | | tolerance of Cucumis sativus L |
| Cucumber (Cucumis sativus) | Salt | Zhu et al. 2004 | Silicon alleviates salt stress and increases antioxidant |
| | | | enzymes activity in leaves of salt-stressed cucumber |
| Maize (Zea mays) | Aluminium | Kidd et al. 2001 | The role of root exudates in aluminium resistance and |
| | | | silicon-induced amelioration of aluminium toxicity in |
| | | | three varieties of |
| Maize (Zea mays) | Aluminum | Wang et al. 2004 | Apoplastic binding of aluminum is involved in silicon- |
| | | | induced amelioration of aluminum toxicity in maize |
| Maize (Zea mays) | Aluminum | Corrales et al. 1997 | Influence of silicon pretreatment on aluminium toxicity in |
| | | | maize roots |
| Maize (Zea mays) | Aluminum | Barcelo et al. 1993 | Silicon amelioration of aluminium toxicity in teosinte |
| Maize (Zea mays) | Cadmium, Zink | da Cunha et al. 2009 | Silicon effects on metal tolerance and structural changes |
| | | | in maize |
| Maize (Zea mays) | Drought | Kaya et al. 2006 | Effect of silicon on plant growth and mineral nutrition of |
| | | | maize grown under water-stress conditions |
| Maize (Zea mays) | Drought | Gao et al. 2005 | Silicon improves water use efficiency in maize plants |
| Maize (Zea mays) | Drought | Li et al. 2007 | Effects of silicon on photosynthesis and antioxidative |
| | | | enzymes of maize under drought stress |
| Maize (Zea mays) | Manganese | Doncheva et al. 2009 | Silicon amelioration of manganese toxicity in Mn- |
| | | | sensitive and Mn-tolerant maize varieties |
| Peanut (Arachis hypogaea) | Cadmium | Shi et al. 2010 | Silicon alleviates cadmium toxicity in peanut plants in |
| | | | relation to cadmium distribution and stimulation of |
| | | | antioxidative enzy |
| Pumpkin (Cucurbita maxima) | Manganese | Iwasaki et al. 1999 | Effect of silicon on alleviation of manganese toxicity in |
| | | | pumpkin |
| Rice (Oryza sativa) | Aluminum | Gu et al. 1998 | Effects of silicon supply on amelioration of aluminum |
| | | | injury and chemical forms of aluminum in rice plants |
| Rice (Oryza sativa) | Cadmium | Wang et al. 2000 | Silicon induced cadmium tolerance of rice seedlings |
| Rice (Oryza sativa) | Cadmium | Zhang et al. 2008 | Long-term effects of exogenous silicon on cadmium |
| | | | translocation and toxicity in rice |
| Rice (Oryza sativa) | Cadmium | Nwugo et al. 2008 | Silicon-induced cadmium resistance in rice |
| Rice (Oryza sativa) | Drought | Chen et al. 2011 | Silicon alleviates drought stress of rice plants by |
| | | | improving plant water status, photosynthesis and |
| | | | mineral nutrient absorpti |
| Rice (Oryza sativa) | Manganese | Horiguchi et al. 1988 | Mechanism of manganese toxicity and tolerance of |
| | | | plants: IV. Effects of silicon on alleviation of manganese |
| | | | toxicity of rice |
| Rice (Oryza sativa) | Salt | Yeo et al. 1999 | Silicon reduces sodium uptake in rice |
| Rice (Oryza sativa) | Uv-b | Li et al. 2004 | Effects of silicon on rice leaves resistance to ultraviolet-B |
| Sorghum | Aluminum, | Galvez et al. 1987 | Silicon interactions with manganese and aluminum |
| | manganese | | toxicity in sorghum |
| Sorghum | Drought | Hattori et al. 2005 | Application of silicon enhanced drought tolerance in |
| | | | Sorghum bicolor |
| Sorghum | Manganese | Galvez et al. 1989 | Effects of silicon on mineral composition of sorghum |
| | | | grown with excess manganese 1 |
| Soybean (Glycine max) | Drought | Shen et al. 2010 | Silicon effects on photosynthesis and antioxidant |
| | | | parameters of soybean seedlings under drought and |
| | | | ultraviolet-B radiation |
| Sugarcane (Saccharum | Aluminum | Fox et al. 1967 | Soil and plant silicon and silicate response by sugarcane |
| officinarum) | | | |
| Wheat (Triticum aestivum) | Boron | Gunes et al. 2007 | Silicon increases boron tolerance and reduces oxidative |
| | | | damage of wheat grown in soil with excess boron |
| Wheat (Triticum aestivum) | Cold | Liang et al. 2008 | Role of silicon in enhancing resistance to freezing stress |
| | | | in two contrasting winter wheat cultivars |
| Wheat (Triticum aestivum) | Drought | Pei et al. 2010 | Silicon improves the tolerance to water-deficit stress |
| | | | induced by polyethylene glycol in wheat |
| Wheat (Triticum aestivum) | Drought | Gong et al. 2005 | Silicon alleviates oxidative damage of wheat plants in |
| | | | pots under drought |
| Wheat (Triticum aestivum) | Drought | Gong et al. 2003 | Effects of silicon on growth of wheat under drought |
| Wheat (Triticum aestivum) | Salt | Ahmad et al. 1992 | Role of silicon in salt tolerance of wheat |
| Wheat (Triticum aestivum) | Salt | Tuna et al. 2008 | Silicon improves salinity tolerance in wheat plants |
| Wheat (Triticum aestivum) | Salt | Tahir et al. 2006 | Beneficial effects of silicon in wheat |
| Wheat (Triticum aestivum) | Salt | Saqib et al. 2008 | Silicon-mediated improvement in the salt resistance of |
| | | | wheat results from increased sodium exclusion and |
| | | | resistance to oxidati |
| Zucchini (Cucurbita pepo) | Salt | Savvas et al. 2009 | Silicon supply in soilless cultivations of zucchini |
| | | | alleviates stress induced by salinity and powdery mildew |
| | | | infections |

TABLE 4
Details of experimental evidence provided in the reports demonstrating the beneficial effects of silicon amendment on
agronomical performance in different plant species

| Table 4. | Agronomical | | |
|---|---|---|---|
| Crop | parameter | Reference | Title of the article |
| Alfalfa (Medicago sativa) | Plant growth | Guo et al. 2006 | Effect of silicon on the morphology of shoots and roots of alfalfa |
| Augustinegrass (Stenotaphrum | Plant growth | Brecht et al. 2004 | Influence of silicon and chlorothalonil on the suppression of gray |
| secundatum) | | | leaf spot and increase plant growth in St. Augustinegrass |
| Banana (Musa × paradisiaca) | Plant growth | Henriet et al. 2006 | Effects, distribution and uptake of silicon in banana |
| Barley (Hordeum vulgare) | Yield | Williams et al. 1957 | The effect of silicon on yield and manganese-54 uptake and |
| | | | distribution in the leaves of barley plants grown in culture solutions |
| Cereals | Seedling growth | Hossain et al. 2002 | Growth promotion and an increase in cell wall extensibility by |
| | | | silicon in rice and some other Poaceae seedlings |
| Cucumber (Cucumis sativus) | Plant growth | Miyake et al. 1983 | Effect of silicon on the growth of solution-cultured cucumber plant |
| Cucumber (Cucumis sativus) | Phosphorus uptake | Marschner et al. 1990 | Growth enhancement by silicon in cucumber plants depends on |
| | | | imbalance in phosphorus and zinc supply |
| Cucumber (Cucumis sativus) | Plant growth | Miyake et al. 1983 | Effect of silicon on the growth of cucumber plant in soil culture |
| Pine (Pinus taeda) | Seedling growth | Emadian et al. 1989 | Growth Enhancement of Loblolly Pine Seedlings by Silicon |
| Rice (Oryza sativa) | Lodging | Idris et al. 1975 | The effect of silicon on lodging of rice in presence of added |
| | | | nitrogen |
| Rice (Oryza sativa) | Phosphorus uptake | Ma et al. 1990 | Effect of silicon on the growth and phosphorus uptake of rice |
| Rice (Oryza sativa) | Plant growth | Ma et al. 1989 | Effect of silicon on the growth of rice plant at different growth |
| | | | stages |
| Rice (Oryza sativa) | Reproductive | Inanaga et al. 2002 | Effect of silicon application on reproductive growth of rice plant |
| | growth | | |
| Rice (Oryza sativa) | Seedling growth | Sistani et al. 1997 | Effect of rice hull ash silicon on rice seedling growth |
| Rice (Oryza sativa) | Yield | Deren et al. 1994 | Silicon concentration, disease response, and yield components of |
| | | | rice genotypes grown on flooded organic histosols |
| Rice (Oryza sativa) | Yield, growth, grain | Korndörfer et al. 1999 | Influence of silicon on grain discoloration and upland rice grown |
| | quality | | on four savanna soils of Brazil |
| Sugarcane (Saccharum officinarum) | Plant growth | Matichenkov et al. | Silicon as a beneficial element for sugarcane |
| | | 2002 | |
| Sunflower (Helianthus annuus) | Plant growth | Kamenidou et al. 2008 | Silicon supplements affect horticultural traits of greenhouse- |
| | | | produced ornamental sunflowers |

### Method of Identifying

[0278] In accordance with a further embodiment of the present invention, there is provided a method for identifying a high Si accumulating soybean variety or lineage comprising the step of: a) obtaining a part of a soybean plant; and b) analyzing the part to detect a marker for soybean high Si uptake, the marker comprising nucleic acid comprising at least one single nucleotide polymorphism (SNP) at a position on chromosome 16 from 33104446 bp to 35762786 bp; wherein when the marker is detected, the variety or lineage is identified as a high Si accumulator (for example, any marker selected from Tables 15-20 or markers in close proximity to).

[0279] Alternatively, in a particular embodiment, the invention provides a method of identifying or selecting a first soybean plant having increased Si uptake, the method comprising the steps of: a) isolating a nucleic acid from a first soybean plant; b) detecting in the nucleic acid the presence of a molecular marker that associates with increased Si uptake and wherein the molecular marker is: associated with a H1 haplotype; or located within 20 cM, 10 cM, ScM, 1 cM or 0.5 cM of a chromosomal interval corresponding to a genomic region from Hikmok sorip chromosome 16 at about 92.6 cM to about 132 cM distance; or located from physical positions 33.15M base-pairs to 36.72M base-pairs as indicated on a genetic linkage map from Hikmok sorip (PI372415A); and c) identifying or selecting the soybean plant on the basis of the presence of the molecular marker of b); thereby identifying or selecting a first soybean plant having increased Si uptake.

[0280] Particularly, this method is used in a commercial soybean plant breeding program More particularly, this the detecting step in this method comprises detecting at least one allelic form of a polymorphic simple sequence repeat (SSR) or a single nucleotide polymorphism (SNP). Most particularly, the detecting comprises amplifying the marker locus or a portion of the marker locus and detecting the resulting amplified marker amplicon (for e.g. a amplicon generated by a primer pair selected from SEQ ID NO. 12, 13 and 278-495).

[0281] In accordance with a particular embodiment of the method for identifying or selecting further comprises the step where the chromosome interval associated with increased Si uptake is introgressed into a second soybean plant or germplasm to produce an introgressed soybean plant or germplasm having increased Si uptake wherein the introgressed soybean plant further comprises at least one of: a) a SNP marker selected from the group consisting of: A(33673022), G(33673483), C(33681630), T(33682500), G(33683047), and C(33683049) on genes Glyma30000 or 30020; b) a marker corresponding to a genomic region from Hikmok sorip chromosome 16 at about 92.6 cM to about 132 cM distance or c) from physical positions 33.15M base-pairs to 36.72M base-pairs, or portion thereof as indicated on a genetic linkage map from Hikmok sorip (PI372415A).

[0282] Still, according to this method, the second soybean plant or germplasm displays low Si uptake as compared to the first soybean plant or germplasm, wherein the introgressed soybean plant or germplasm displays increased Si uptake as compared to the second plant or germplasm. Particularly, the second soybean plant or germplasm comprises an elite soybean strain or an exotic soybean strain,

[0283] In accordance with a particular aspect, the method of identifying may also comprise electronically transmitting or electronically storing data representing the detected allele or molecular marker in a computer readable medium. Still, particularly, the molecular marker or allele is determined using TASSEL, GeneFlow, or MapManager-QTX software.

[0284] Particularly, at least one parental line of the plant may be selected or identified by a molecular marker associated with a nucleic acid as defined herein.

### Markers

[0285] In particular, the present invention provides at least one marker indicative of high Si uptake for soybean or other plants, particularly located from 33.15 Mb pairs to 36.72 Mb pairs of the Williams82 reference genome. This marker is useful for developing and identifying a soybean plant that has, or has been modified to achieve, high Si uptake.

[0286] Still, particularly, the plant originates from a parental line that was selected or identified by a molecular marker located within 20 cM, 10 cM, 5 cM, 1 cM or 0.5 cM of the chromosomal interval, wherein the molecular marker is associated with Si accumulation in the plant, more particularly, high Si accumulation.

[0287] According to a particular embodiment, the marker corresponds to: a genomic region from Hikmok sorip chromosome 16 at about 92.6 cM to about 132 cM distance; or a genomic region from physical positions 33.15M base-pairs to 36.72M base-pairs, or portion thereof as indicated on a genetic linkage map from Hikmok sorip (PI372415A). Alternatively the marker corresponds to a SNP selected from the group consisting of: A(33673022), G(33673483), C(33681630), T(33682500), G(33683047), and C(33683049) of genes glyma16g:30000 or glyma16g:30020.

[0288] Alternatively, the molecular marker is located within 20 cM, 10 cM, 5 cM, 1 cM or 0.5 cM of a single nucleotide polymorphism (SNP) marker associated with increased Si accumulation selected from the group consisting of: G(33672717), A(33673022), G(33673483), C(33681630), T(33681946), T(33681961), T(33682500), G(33683047), C(33683049) and any marker indicated in Tables 15-18 as indicated on a genetic linkage map from Hikmok sorip (PI372415A).

[0289] More particularly, this marker is a nucleic acid that may include a single nucleotide polymorphism selected from the group consisting of: SNP605 (33104446 bp), SNP606 (33527064 bp), SNP607 (33595090 bp), SNP608 (33802005 bp), SNP609 (35218844 bp) and SNP610 (35762786 bp) as found in chromosome 16 of Hikmok sorip.

[0290] In particular, the molecular marker is a single nucleotide polymorphism (SNP), a quantitative trait locus (QTL), an amplified fragment length polymorphism (AFLP), randomly amplified polymorphic DNA (RAPD), a restriction fragment length polymorphism (RFLP) or a microsatellite.

[0291] The genomic region on chromosome 16 corresponding to the markers found is as defined by SEQ ID NO.1. Table 5 lists the high silicon accumulator region from chromosome 16 of Hikmok sorip soybean plant and the corresponding putative gene start and end codons as defined by SEQ ID NO.1.

TABLE 5
List of potential genes present at Hisil region on chromosome
16 from 33104446 bp to 35762786 bp from Hikmok sorip

| Gene Name | Transcript Name | Gene Start (bp) | Gene End (bp) |
|---|---|---|---|
| Glyma16g29287 | Glyma16g29287.1 | 33117480 | 33118554 |
| Glyma16g29300 | Glyma16g29300.2 | 33121274 | 33125742 |
| Glyma16g29300 | Glyma16g29300.3 | 33121274 | 33125742 |
| Glyma16g29315 | Glyma16g29315.1 | 33140575 | 33145668 |
| Glyma16g29315 | Glyma16g29315.2 | 33140601 | 33145666 |
| Glyma16g29330 | Glyma16g29330.1 | 33163898 | 33165670 |
| Glyma16g29340 | Glyma16g29340.1 | 33176754 | 33178509 |
| Glyma16g29370 | Glyma16g29370.1 | 33191101 | 33193066 |
| Glyma16g29380 | Glyma16g29380.1 | 33209634 | 33211251 |
| Glyma16g29400 | Glyma16g29400.1 | 33218464 | 33219888 |
| Glyma16g29411 | Glyma16g29411.1 | 33224507 | 33241114 |
| Glyma16g29420 | Glyma16g29420.1 | 33235180 | 33237175 |
| Glyma16g29430 | Glyma16g29430.1 | 33242250 | 33244325 |
| Glyma16g29440 | Glyma16g29440.3 | 33245292 | 33252887 |
| Glyma16g29440 | Glyma16g29440.4 | 33245292 | 33252887 |
| Glyma16g29440 | Glyma16g29440.2 | 33245292 | 33252887 |
| Glyma16g29450 | Glyma16g29450.3 | 33263382 | 33267806 |
| Glyma16g29450 | Glyma16g29450.1 | 33263382 | 33267786 |
| Glyma16g29450 | Glyma16g29450.4 | 33263382 | 33267786 |
| Glyma16g29463 | Glyma16g29463.1 | 33270817 | 33271810 |
| Glyma16g29476 | Glyma16g29476.1 | 33275084 | 33279607 |
| Glyma16g29490 | Glyma16g29490.2 | 33293375 | 33297776 |
| Glyma16g29490 | Glyma16g29490.3 | 33293375 | 33297776 |
| Glyma16g29501 | Glyma16g29501.1 | 33312431 | 33313552 |
| Glyma16g29510 | Glyma16g29510.1 | 33317104 | 33319767 |
| Glyma16g29520 | Glyma16g29520.2 | 33321294 | 33325497 |
| Glyma16g29541 | Glyma16g29541.1 | 33336584 | 33343085 |
| Glyma16g29561 | Glyma16g29561.1 | 33345959 | 33347937 |
| Glyma16g29580 | Glyma16g29580.1 | 33354370 | 33360885 |
| Glyma16g29590 | Glyma16g29590.4 | 33362742 | 33365896 |
| Glyma16g29590 | Glyma16g29590.3 | 33362742 | 33365896 |
| Glyma16g29600 | Glyma16g29600.2 | 33366648 | 33373909 |
| Glyma16g29600 | Glyma16g29600.3 | 33366648 | 33373909 |
| Glyma16g29611 | Glyma16g29611.1 | 33375473 | 33380054 |
| Glyma16g29620 | Glyma16g29620.1 | 33382294 | 33383795 |
| Glyma16g29630 | Glyma16g29630.1 | 33385941 | 33388630 |
| Glyma16g29640 | Glyma16g29640.1 | 33391337 | 33392933 |
| Glyma16g29650 | Glyma16g29650.2 | 33404884 | 33406256 |
| Glyma16g29650 | Glyma16g29650.1 | 33404884 | 33406256 |
| Glyma16g29661 | Glyma16g29661.1 | 33409758 | 33410957 |
| Glyma16g29670 | Glyma16g29670.1 | 33413333 | 33414359 |
| Glyma16g29680 | Glyma16g29680.2 | 33416009 | 33417784 |
| Glyma16g29690 | Glyma16g29690.1 | 33423741 | 33425662 |
| Glyma16g29690 | Glyma16g29690.2 | 33423741 | 33425662 |
| Glyma16g29701 | Glyma16g29701.1 | 33428773 | 33429954 |
| Glyma16g29710 | Glyma16g29710.1 | 33432555 | 33433447 |
| Glyma16g29720 | Glyma16g29720.1 | 33439338 | 33441275 |
| Glyma16g29740 | Glyma16g29740.1 | 33444567 | 33451843 |
| Glyma16g29750 | Glyma16g29750.1 | 33452984 | 33456955 |
| Glyma16g29760 | Glyma16g29760.1 | 33457391 | 33463325 |
| Glyma16g29760 | Glyma16g29760.2 | 33457391 | 33463325 |
| Glyma16g29780 | Glyma16g29780.1 | 33465753 | 33469045 |
| Glyma16g29790 | Glyma16g29790.1 | 33472525 | 33475361 |
| Glyma16g29810 | Glyma16g29810.2 | 33488916 | 33490567 |
| Glyma16g29841 | Glyma16g29841.1 | 33495788 | 33498544 |
| Glyma16g29841 | Glyma16g29841.2 | 33495788 | 33498544 |
| Glyma16g29841 | Glyma16g29841.3 | 33495836 | 33498541 |
| Glyma16g29841 | Glyma16g29841.4 | 33495940 | 33498153 |
| Glyma16g29830 | Glyma16g29830.1 | 33497194 | 33497346 |
| Glyma16g29850 | Glyma16g29850.2 | 33500401 | 33502384 |
| Glyma16g29860 | Glyma16g29860.1 | 33504174 | 33508434 |
| Glyma16g29860 | Glyma16g29860.2 | 33504174 | 33508434 |
| Glyma16g29870 | Glyma16g29870.2 | 33513548 | 33516668 |
| Glyma16g29880 | Glyma16g29880.2 | 33521922 | 33522569 |
| Glyma16g29890 | Glyma16g29890.1 | 33525365 | 33530003 |
| Glyma16g29900 | Glyma16g29900.1 | 33539909 | 33542679 |
| Glyma16g29910 | Glyma16g29910.2 | 33567442 | 33572345 |
| Glyma16g29910 | Glyma16g29910.3 | 33567460 | 33572332 |
| Glyma16g29910 | Glyma16g29910.1 | 33567460 | 33572332 |
| Glyma16g29920 | Glyma16g29920.2 | 33580523 | 33584738 |
| Glyma16g29920 | Glyma16g29920.1 | 33580799 | 33584738 |
| Glyma16g29930 | Glyma16g29930.2 | 33589335 | 33590105 |
| Glyma16g29950 | Glyma16g29950.1 | 33596241 | 33597276 |
| Glyma16g29960 | Glyma16g29960.1 | 33608683 | 33612574 |
| Glyma16g29980 | Glyma16g29980.2 | 33632785 | 33637232 |
| Glyma16g29990 | Glyma16g29990.2 | 33650887 | 33653599 |
| Glyma16g30000 | Glyma16g30000.1 | 33667117 | 33674724 |
| Glyma16g30000 | Glyma16g30000.2 | 33670072 | 33674724 |
| Glyma16g30020 | Glyma16g30020.2 | 33680052 | 33684676 |
| Glyma16g30030 | Glyma16g30030.1 | 33692439 | 33700420 |
| Glyma16g30041 | Glyma16g30041.1 | 33705120 | 33711897 |
| Glyma16g30050 | Glyma16g30050.3 | 33719023 | 33724462 |
| Glyma16g30060 | Glyma16g30060.1 | 33727942 | 33736003 |
| Glyma16g30070 | Glyma16g30070.2 | 33738529 | 33744838 |
| Glyma16g30081 | Glyma16g30081.3 | 33748982 | 33756820 |
| Glyma16g30081 | Glyma16g30081.8 | 33748982 | 33756820 |
| Glyma16g30081 | Glyma16g30081.2 | 33748982 | 33756820 |
| Glyma16g30081 | Glyma16g30081.7 | 33748982 | 33756820 |
| Glyma16g30081 | Glyma16g30081.4 | 33748982 | 33756820 |
| Glyma16g30081 | Glyma16g30081.11 | 33748982 | 33756820 |
| Glyma16g30081 | Glyma16g30081.12 | 33748982 | 33756820 |
| Glyma16g30081 | Glyma16g30081.5 | 33748982 | 33756820 |
| Glyma16g30081 | Glyma16g30081.9 | 33748982 | 33756820 |
| Glyma16g30081 | Glyma16g30081.10 | 33748982 | 33756820 |
| Glyma16g30081 | Glyma16g30081.6 | 33748982 | 33756820 |
| Glyma16g30081 | Glyma16g30081.1 | 33748982 | 33756820 |
| Glyma16g30090 | Glyma16g30090.1 | 33757760 | 33758933 |
| Glyma16g30100 | Glyma16g30100.2 | 33761031 | 33770049 |
| Glyma16g30110 | Glyma16g30110.1 | 33767168 | 33767729 |
| Glyma16g30120 | Glyma16g30120.3 | 33776196 | 33781762 |
| Glyma16g30120 | Glyma16g30120.4 | 33776196 | 33780563 |
| Glyma16g30120 | Glyma16g30120.1 | 33776196 | 33781762 |
| Glyma16g30130 | Glyma16g30130.3 | 33787390 | 33791448 |
| Glyma16g30130 | Glyma16g30130.2 | 33787390 | 33791448 |
| Glyma16g30130 | Glyma16g30130.1 | 33787390 | 33790230 |
| Glyma16g30140 | Glyma16g30140.1 | 33792950 | 33798397 |
| Glyma16g30160 | Glyma16g30160.2 | 33800079 | 33806673 |
| Glyma16g30160 | Glyma16g30160.5 | 33800079 | 33806706 |
| Glyma16g30160 | Glyma16g30160.6 | 33800079 | 33806673 |
| Glyma16g30160 | Glyma16g30160.8 | 33800079 | 33806706 |
| Glyma16g30160 | Glyma16g30160.4 | 33800079 | 33806706 |
| Glyma16g30160 | Glyma16g30160.3 | 33800079 | 33806673 |
| Glyma16g30160 | Glyma16g30160.7 | 33800079 | 33806706 |
| Glyma16g30160 | Glyma16g30160.1 | 33800079 | 33806673 |
| Glyma16g30171 | Glyma16g30171.1 | 33810198 | 33825843 |
| Glyma16g30180 | Glyma16g30180.1 | 33826554 | 33831319 |
| Glyma16g30190 | Glyma16g30190.2 | 33833508 | 33853555 |
| Glyma16g30190 | Glyma16g30190.1 | 33833508 | 33853573 |
| Glyma16g30200 | Glyma16g30200.2 | 33866910 | 33870690 |
| Glyma16g30226 | Glyma16g30226.1 | 33896142 | 33899032 |
| Glyma16g30253 | Glyma16g30253.1 | 33916604 | 33918157 |
| Glyma16g30280 | Glyma16g30280.2 | 33946050 | 33949661 |
| Glyma16g30300 | Glyma16g30300.2 | 33962631 | 33965663 |
| Glyma16g30313 | Glyma16g30313.1 | 33970078 | 33977963 |
| Glyma16g30326 | Glyma16g30326.1 | 33971597 | 33975074 |
| Glyma16g30340 | Glyma16g30340.2 | 33981493 | 33984969 |
| Glyma16g30350 | Glyma16g30350.2 | 34010075 | 34013595 |
| Glyma16g30363 | Glyma16g30363.1 | 34027748 | 34030346 |
| Glyma16g30376 | Glyma16g30376.1 | 34039150 | 34040734 |
| Glyma16g30390 | Glyma16g30390.2 | 34047074 | 34050258 |
| Glyma16g30410 | Glyma16g30410.2 | 34061204 | 34063904 |
| Glyma16g30420 | Glyma16g30420.2 | 34065972 | 34067637 |
| Glyma16g30430 | Glyma16g30430.2 | 34068410 | 34069518 |
| Glyma16g30440 | Glyma16g30440.2 | 34074623 | 34078309 |
| Glyma16g30470 | Glyma16g30470.2 | 34085996 | 34093659 |
| Glyma16g30480 | Glyma16g30480.1 | 34098513 | 34101191 |
| Glyma16g30510 | Glyma16g30510.2 | 34109171 | 34112170 |
| Glyma16g30521 | Glyma16g30521.1 | 34119569 | 34122367 |
| Glyma16g30531 | Glyma16g30531.1 | 34126143 | 34128364 |
| Glyma16g30540 | Glyma16g30540.2 | 34131280 | 34134472 |
| Glyma16g30550 | Glyma16g30550.1 | 34141781 | 34142371 |
| Glyma16g30561 | Glyma16g30561.1 | 34144846 | 34147584 |
| Glyma16g30570 | Glyma16g30570.2 | 34152774 | 34157131 |
| Glyma16g30590 | Glyma16g30590.2 | 34164509 | 34167564 |
| Glyma16g30600 | Glyma16g30600.2 | 34174100 | 34176898 |
| Glyma16g30616 | Glyma16g30616.1 | 34180572 | 34181194 |
| Glyma16g30616 | Glyma16g30616.2 | 34180572 | 34183280 |
| Glyma16g30633 | Glyma16g30633.1 | 34187958 | 34190245 |
| Glyma16g30650 | Glyma16g30650.2 | 34203165 | 34206147 |
| Glyma16g30665 | Glyma16g30665.1 | 34215892 | 34218959 |
| Glyma16g30681 | Glyma16g30681.1 | 34225159 | 34226075 |
| Glyma16g30695 | Glyma16g30695.1 | 34227416 | 34230758 |
| Glyma16g30711 | Glyma16g30711.1 | 34237913 | 34239715 |
| Glyma16g30725 | Glyma16g30725.1 | 34245189 | 34245914 |
| Glyma16g30741 | Glyma16g30741.1 | 34250763 | 34253567 |
| Glyma16g30755 | Glyma16g30755.1 | 34260057 | 34262063 |
| Glyma16g30771 | Glyma16g30771.1 | 34270990 | 34273566 |
| Glyma16g30785 | Glyma16g30785.1 | 34277297 | 34289608 |
| Glyma16g30801 | Glyma16g30801.1 | 34299880 | 34303752 |
| Glyma16g30815 | Glyma16g30815.1 | 34304254 | 34321039 |
| Glyma16g30830 | Glyma16g30830.2 | 34327790 | 34330278 |
| Glyma16g30845 | Glyma16g30845.1 | 34343103 | 34345507 |
| Glyma16g30860 | Glyma16g30860.2 | 34350267 | 34353513 |
| Glyma16g30875 | Glyma16g30875.1 | 34360118 | 34363708 |
| Glyma16g30890 | Glyma16g30890.1 | 34367958 | 34370189 |
| Glyma16g30901 | Glyma16g30901.1 | 34379874 | 34380816 |
| Glyma16g30911 | Glyma16g30911.1 | 34382570 | 34385836 |
| Glyma16g30921 | Glyma16g30921.1 | 34392915 | 34395142 |
| Glyma16g30931 | Glyma16g30931.1 | 34413874 | 34423850 |
| Glyma16g30941 | Glyma16g30941.1 | 34420445 | 34440658 |
| Glyma16g30950 | Glyma16g30950.2 | 34443330 | 34446271 |
| Glyma16g30961 | Glyma16g30961.1 | 34453769 | 34458986 |
| Glyma16g30972 | Glyma16g30972.1 | 34456414 | 34463881 |
| Glyma16g30984 | Glyma16g30984.1 | 34464676 | 34469018 |
| Glyma16g30996 | Glyma16g30996.1 | 34466336 | 34466572 |
| Glyma16g31008 | Glyma16g31008.1 | 34474322 | 34475303 |
| Glyma16g31020 | Glyma16g31020.2 | 34483428 | 34491541 |
| Glyma16g31030 | Glyma16g31030.2 | 34494095 | 34496893 |
| Glyma16g31040 | Glyma16g31040.2 | 34500758 | 34501087 |
| Glyma16g31060 | Glyma16g31060.2 | 34512137 | 34515667 |
| Glyma16g31081 | Glyma16g31081.1 | 34526372 | 34529015 |
| Glyma16g31101 | Glyma16g31101.1 | 34533563 | 34534851 |
| Glyma16g31120 | Glyma16g31120.2 | 34550423 | 34557696 |
| Glyma16g31130 | Glyma16g31130.1 | 34561725 | 34562879 |
| Glyma16g31140 | Glyma16g31140.2 | 34586468 | 34589865 |
| Glyma16g31180 | Glyma16g31180.2 | 34618840 | 34621584 |
| Glyma16g31210 | Glyma16g31210.2 | 34645941 | 34648739 |
| Glyma16g31220 | Glyma16g31220.2 | 34651183 | 34652734 |
| Glyma16g31220 | Glyma16g31220.3 | 34651183 | 34652734 |
| Glyma16g31231 | Glyma16g31231.4 | 34653118 | 34667155 |
| Glyma16g31231 | Glyma16g31231.3 | 34653118 | 34667155 |
| Glyma16g31241 | Glyma16g31241.1 | 34654850 | 34655666 |
| Glyma16g31231 | Glyma16g31231.2 | 34660035 | 34667155 |
| Glyma16g31231 | Glyma16g31231.1 | 34660035 | 34667155 |
| Glyma16g31250 | Glyma16g31250.1 | 34669813 | 34673540 |
| Glyma16g31260 | Glyma16g31260.1 | 34677365 | 34679392 |
| Glyma16g31270 | Glyma16g31270.3 | 34682085 | 34683529 |
| Glyma16g31270 | Glyma16g31270.1 | 34682085 | 34683529 |
| Glyma16g31270 | Glyma16g31270.2 | 34682544 | 34683529 |
| Glyma16g31280 | Glyma16g31280.1 | 34699439 | 34702318 |
| Glyma16g31280 | Glyma16g31280.2 | 34699439 | 34702318 |
| Glyma16g31290 | Glyma16g31290.1 | 34702979 | 34706487 |
| Glyma16g31310 | Glyma16g31310.2 | 34718954 | 34724418 |
| Glyma16g31310 | Glyma16g31310.3 | 34718954 | 34724418 |
| Glyma16g31320 | Glyma16g31320.1 | 34726089 | 34733867 |
| Glyma16g31331 | Glyma16g31331.1 | 34735450 | 34739788 |
| Glyma16g31341 | Glyma16g31341.1 | 34744896 | 34749567 |
| Glyma16g31350 | Glyma16g31350.2 | 34767912 | 34769477 |
| Glyma16g31360 | Glyma16g31360.2 | 34788417 | 34791395 |
| Glyma16g31370 | Glyma16g31370.2 | 34797428 | 34801525 |
| Glyma16g31385 | Glyma16g31385.1 | 34803261 | 34803842 |
| Glyma16g31401 | Glyma16g31401.1 | 34804278 | 34806566 |
| Glyma16g31415 | Glyma16g31415.1 | 34812089 | 34814921 |
| Glyma16g31431 | Glyma16g31431.1 | 34819229 | 34820385 |
| Glyma16g31445 | Glyma16g31445.1 | 34826067 | 34830437 |
| Glyma16g31461 | Glyma16g31461.1 | 34834622 | 34846900 |
| Glyma16g31475 | Glyma16g31475.1 | 34855375 | 34856025 |
| Glyma16g31490 | Glyma16g31490.1 | 34876162 | 34879472 |
| Glyma16g31510 | Glyma16g31510.2 | 34896690 | 34899605 |
| Glyma16g31540 | Glyma16g31540.2 | 34904513 | 34905951 |
| Glyma16g31551 | Glyma16g31551.1 | 34908930 | 34910778 |
| Glyma16g31560 | Glyma16g31560.2 | 34917788 | 34920680 |
| Glyma16g31571 | Glyma16g31571.1 | 34923276 | 34923578 |
| Glyma16g31580 | Glyma16g31580.2 | 34925971 | 34927766 |
| Glyma16g31591 | Glyma16g31591.1 | 34933244 | 34934152 |
| Glyma16g31600 | Glyma16g31600.2 | 34938490 | 34941771 |
| Glyma16g31611 | Glyma16g31611.1 | 34943360 | 34950329 |
| Glyma16g31620 | Glyma16g31620.2 | 34950787 | 34955126 |
| Glyma16g31630 | Glyma16g31630.2 | 34958517 | 34961556 |
| Glyma16g31647 | Glyma16g31647.1 | 34974721 | 34977976 |
| Glyma16g31664 | Glyma16g31664.1 | 34984443 | 34988916 |
| Glyma16g31682 | Glyma16g31682.1 | 34984790 | 34986122 |
| Glyma16g31700 | Glyma16g31700.2 | 34995984 | 34999108 |
| Glyma16g31712 | Glyma16g31712.1 | 35003517 | 35006525 |
| Glyma16g31724 | Glyma16g31724.1 | 35017391 | 35030565 |
| Glyma16g31736 | Glyma16g31736.1 | 35044545 | 35045905 |
| Glyma16g31748 | Glyma16g31748.1 | 35047856 | 35049836 |
| Glyma16g31760 | Glyma16g31760.2 | 35056954 | 35061145 |
| Glyma16g31780 | Glyma16g31780.2 | 35065425 | 35065778 |
| Glyma16g31790 | Glyma16g31790.2 | 35068379 | 35071542 |
| Glyma16g31800 | Glyma16g31800.2 | 35078773 | 35082273 |
| Glyma16g31820 | Glyma16g31820.2 | 35095991 | 35103464 |
| Glyma16g31840 | Glyma16g31840.2 | 35108885 | 35110857 |
| Glyma16g31851 | Glyma16g31851.1 | 35120596 | 35126759 |
| Glyma16g31862 | Glyma16g31862.2 | 35127702 | 35135066 |
| Glyma16g31862 | Glyma16g31862.6 | 35127702 | 35135025 |
| Glyma16g31862 | Glyma16g31862.1 | 35127702 | 35136429 |
| Glyma16g31862 | Glyma16g31862.5 | 35127702 | 35135025 |
| Glyma16g31862 | Glyma16g31862.4 | 35127702 | 35136429 |
| Glyma16g31862 | Glyma16g31862.3 | 35127702 | 35135066 |
| Glyma16g31873 | Glyma16g31873.1 | 35135542 | 35139375 |
| Glyma16g31884 | Glyma16g31884.1 | 35137172 | 35137823 |
| Glyma16g31896 | Glyma16g31896.1 | 35145762 | 35146782 |
| Glyma16g31908 | Glyma16g31908.2 | 35161155 | 35166736 |
| Glyma16g31908 | Glyma16g31908.1 | 35161247 | 35166736 |
| Glyma16g31908 | Glyma16g31908.3 | 35161247 | 35166736 |
| Glyma16g31920 | Glyma16g31920.1 | 35168787 | 35173247 |
| Glyma16g31930 | Glyma16g31930.2 | 35174993 | 35176036 |
| Glyma16g31936 | Glyma16g31936.1 | 35180966 | 35181906 |
| Glyma16g31942 | Glyma16g31942.1 | 35181912 | 35186830 |
| Glyma16g31949 | Glyma16g31949.1 | 35182912 | 35184891 |
| Glyma16g31956 | Glyma16g31956.1 | 35187593 | 35188254 |
| Glyma16g31963 | Glyma16g31963.1 | 35188890 | 35190443 |
| Glyma16g31970 | Glyma16g31970.1 | 35193211 | 35194159 |
| Glyma16g31980 | Glyma16g31980.5 | 35195308 | 35201419 |
| Glyma16g31980 | Glyma16g31980.4 | 35195308 | 35201419 |
| Glyma16g31980 | Glyma16g31980.6 | 35195322 | 35201419 |
| Glyma16g31980 | Glyma16g31980.7 | 35195322 | 35201419 |
| Glyma16g31980 | Glyma16g31980.8 | 35197420 | 35201419 |
| Glyma16g31980 | Glyma16g31980.11 | 35197420 | 35201419 |
| Glyma16g31980 | Glyma16g31980.9 | 35197420 | 35201419 |
| Glyma16g31980 | Glyma16g31980.10 | 35197420 | 35201419 |
| Glyma16g31990 | Glyma16g31990.1 | 35202968 | 35208716 |
| Glyma16g31990 | Glyma16g31990.3 | 35202988 | 35208716 |
| Glyma16g31990 | Glyma16g31990.2 | 35203113 | 35208716 |
| Glyma16g32000 | Glyma16g32000.1 | 35212289 | 35215006 |
| Glyma16g32010 | Glyma16g32010.1 | 35215939 | 35218572 |
| Glyma16g32022 | Glyma16g32022.1 | 35225028 | 35236073 |
| Glyma16g32034 | Glyma16g32034.1 | 35227845 | 35230577 |
| Glyma16g32046 | Glyma16g32046.2 | 35243719 | 35246547 |
| Glyma16g32046 | Glyma16g32046.1 | 35243719 | 35246547 |
| Glyma16g32058 | Glyma16g32058.1 | 35245500 | 35245851 |
| Glyma16g32070 | Glyma16g32070.1 | 35256457 | 35258288 |
| Glyma16g32080 | Glyma16g32080.4 | 35274147 | 35275762 |
| Glyma16g32080 | Glyma16g32080.3 | 35274147 | 35275762 |
| Glyma16g32090 | Glyma16g32090.1 | 35278581 | 35286898 |
| Glyma16g32121 | Glyma16g32121.2 | 35305441 | 35308719 |
| Glyma16g32121 | Glyma16g32121.1 | 35305441 | 35308719 |
| Glyma16g32110 | Glyma16g32110.1 | 35305462 | 35306107 |
| Glyma16g32121 | Glyma16g32121.4 | 35305462 | 35308701 |
| Glyma16g32121 | Glyma16g32121.3 | 35305462 | 35308701 |
| Glyma16g32130 | Glyma16g32130.5 | 35310409 | 35317298 |
| Glyma16g32130 | Glyma16g32130.3 | 35310409 | 35316403 |
| Glyma16g32130 | Glyma16g32130.4 | 35310409 | 35316886 |
| Glyma16g32130 | Glyma16g32130.2 | 35310409 | 35316403 |
| Glyma16g32150 | Glyma16g32150.1 | 35328496 | 35331807 |
| Glyma16g32161 | Glyma16g32161.1 | 35337880 | 35343544 |
| Glyma16g32170 | Glyma16g32170.1 | 35347974 | 35348867 |
| Glyma16g32180 | Glyma16g32180.2 | 35351288 | 35358069 |
| Glyma16g32196 | Glyma16g32196.1 | 35366791 | 35369264 |
| Glyma16g32196 | Glyma16g32196.2 | 35366791 | 35369264 |
| Glyma16g32190 | Glyma16g32190.1 | 35366950 | 35368897 |
| Glyma16g32196 | Glyma16g32196.3 | 35367707 | 35369264 |
| Glyma16g32203 | Glyma16g32203.1 | 35375597 | 35378168 |
| Glyma16g32210 | Glyma16g32210.1 | 35379222 | 35380970 |
| Glyma16g32220 | Glyma16g32220.1 | 35381367 | 35384474 |
| Glyma16g32230 | Glyma16g32230.1 | 35394552 | 35398580 |
| Glyma16g32236 | Glyma16g32236.2 | 35400692 | 35405759 |
| Glyma16g32236 | Glyma16g32236.1 | 35400692 | 35405759 |
| Glyma16g32243 | Glyma16g32243.1 | 35406930 | 35407139 |
| Glyma16g32250 | Glyma16g32250.1 | 35408840 | 35416022 |
| Glyma16g32260 | Glyma16g32260.2 | 35417721 | 35425030 |
| Glyma16g32260 | Glyma16g32260.1 | 35417721 | 35425030 |
| Glyma16g32270 | Glyma16g32270.2 | 35425055 | 35430939 |
| Glyma16g32270 | Glyma16g32270.3 | 35425055 | 35430939 |
| Glyma16g32270 | Glyma16g32270.1 | 35425177 | 35430891 |
| Glyma16g32280 | Glyma16g32280.2 | 35440162 | 35442849 |
| Glyma16g32280 | Glyma16g32280.1 | 35440162 | 35442849 |
| Glyma16g32290 | Glyma16g32290.1 | 35454865 | 35457541 |
| Glyma16g32290 | Glyma16g32290.2 | 35454865 | 35457541 |
| Glyma16g32300 | Glyma16g32300.2 | 35488415 | 35490103 |
| Glyma16g32311 | Glyma16g32311.1 | 35503073 | 35516852 |
| Glyma16g32321 | Glyma16g32321.2 | 35526837 | 35530790 |
| Glyma16g32321 | Glyma16g32321.1 | 35526837 | 35530790 |
| Glyma16g32330 | Glyma16g32330.1 | 35538228 | 35539639 |
| Glyma16g32340 | Glyma16g32340.2 | 35541179 | 35546270 |
| Glyma16g32360 | Glyma16g32360.1 | 35552398 | 35557322 |
| Glyma16g32360 | Glyma16g32360.3 | 35552401 | 35557156 |
| Glyma16g32370 | Glyma16g32370.1 | 35558691 | 35564779 |
| Glyma16g32380 | Glyma16g32380.1 | 35567986 | 35569243 |
| Glyma16g32390 | Glyma16g32390.1 | 35568177 | 35571909 |
| Glyma16g32400 | Glyma16g32400.1 | 35579749 | 35582107 |
| Glyma16g32410 | Glyma16g32410.1 | 35581736 | 35582053 |
| Glyma16g32420 | Glyma16g32420.2 | 35584421 | 35587867 |
| Glyma16g32430 | Glyma16g32430.1 | 35590370 | 35592994 |
| Glyma16g32440 | Glyma16g32440.1 | 35598614 | 35599743 |
| Glyma16g32450 | Glyma16g32450.2 | 35604237 | 35604446 |
| Glyma16g32470 | Glyma16g32470.2 | 35617324 | 35619664 |
| Glyma16g32480 | Glyma16g32480.1 | 35624252 | 35630761 |
| Glyma16g32480 | Glyma16g32480.2 | 35624252 | 35630761 |
| Glyma16g32490 | Glyma16g32490.1 | 35634515 | 35637657 |
| Glyma16g32500 | Glyma16g32500.2 | 35647927 | 35652132 |
| Glyma16g32510 | Glyma16g32510.4 | 35660223 | 35664653 |
| Glyma16g32510 | Glyma16g32510.8 | 35660223 | 35664653 |
| Glyma16g32510 | Glyma16g32510.7 | 35660223 | 35664653 |
| Glyma16g32510 | Glyma16g32510.6 | 35660223 | 35664653 |
| Glyma16g32510 | Glyma16g32510.5 | 35661377 | 35664653 |
| Glyma16g32530 | Glyma16g32530.1 | 35669990 | 35674391 |
| Glyma16g32540 | Glyma16g32540.1 | 35676577 | 35684221 |
| Glyma16g32540 | Glyma16g32540.2 | 35676581 | 35684221 |
| Glyma16g32550 | Glyma16g32550.2 | 35716377 | 35717742 |
| Glyma16g32560 | Glyma16g32560.1 | 35727559 | 35729561 |
| Glyma16g32571 | Glyma16g32571.1 | 35733139 | 35734235 |
| Glyma16g32580 | Glyma16g32580.2 | 35747649 | 35752613 |

Note:
The physical position of markers on chromosome 16 (in Mb or bp) is based on publicly available Williams82 reference line (SOYBASE); Soybean genome assembly from JGI release 8. Based on the original Glyma v1 (January 2012).

[0292] In one embodiment of the invention a HiSil plant may be produced, selected or identified through the introduction or detection of a gene listed in Table 5. Particularly, any of genes Glyma16g29990, Glyma16g30000, Glyma16g30020. In another embodiment about 2 kilobases, 1 kilobase or 0.5 kilobase pairs upstream from the genes listed in Table 5 may be utilized as a promoter to facilitate gene expression in a cell. Particularly, 2, 1 or 0.5 kilobases upstream of the 5′ starting codon of any one of Glyma16g29990, Glyma16g30000, Glyma16g30020 may be used as a root-preferred promoter region. In this aspect any promoter sequence as described or any expression cassette comprising said promoter region and any plant comprising the resulting expression cassette.

[0293] A set of five markers in the HiSil region was developed for the discriminant detection of HiSil gene in a segregating population. A first marker called HiSil-Del was designed based on a large deletion (˜286 bp, Gm16:33,712,274 to 33,712,559) present in the cultivar Hikmok sorip when compared to the Wlliams82 reference genome. The HiSil-Del is tightly linked to HiSil since it is separated by a distance of only 28 Kb. Because of the large size difference in PCR amplicons, the marker HiSil-Del can be used to screen the presence of HiSil even using agarose gel electrophoresis.

[0294] In accordance with a further aspect to the invention, four gene markers specific to the HiSil gene (including three deletions and one insertion) were developed. Particularly, these markers can be defined by SEQ ID NO. 2, 3, 4, 5, 6, 7, 8, 9, 10 and 11.

[0295] In addition, four other gene-specific markers, including three deletions and one insertion were developed. These markers are helpful to follow the HiSil gene in segregating progenies and can be used to identify the gene in any new sources of germplasm. Particularly, these markers can be defined as HiSil-dell; HiSil-de12; HiSil-de13b, HiSil-insl and HiSil-Del and are capable to be amplified and identified with the following primer sequences: SEQ ID NO. 2, 3, 4, 5, 6, 7, 8, 9, 10 and 11.

[0296] In accordance with a further aspect of the invention, there is provided Cleaved Amplified Polymorphic Sequences (CAPS) markers linked to the HiSil gene. These markers are specifically cleaved by a restriction enzyme to yield distinct fragments in the HiSil gene. Particularly, these markers can be defined as HiSil-Mboll_F or HiSil-Mboll_R, and are capable to amplified and identified with the following sequences: SEQ ID NO. 12 and 13.

### Nucleic Acids and Proteins Sequences

[0297] In accordance with the different aspect of the invention, the genomic region comprising the HiSil gene corresponds to the region defined by SEQ ID NO.1, or can be defined as 14 or 16 or a portion thereof.

TABLE 6
List of Williams & Hikmok sequences

| SEQ | | |
|---|---|---|
| ID. No. | Variety | Definition |
| 1 | Williams | Glyma16g: HiSil region 33104446 . . . 35762786 |
| 14 | Hikmok | Glyma16g: 30020; CDS 577172 . . . 579696 |
| 15 | Hikmok | Glyma16g: 30020 protein |
| 16 | Hikmok | Glyma16g30000 CDS 567613 . . . 569933 |
| 17 | Hikmok | Glyma16g: 300000 protein |
| 18 | Williams82 | Glyma16g: 30000: partial promoter |
| 19 | Williams82 | Glyma16g: 30000: putative promoter |
| 20 | Williams82 | Glyma16g: 30020: putative promoter |
| 21 | Williams 82 | Glyma16g: 30000 CDS |
| 22 | Williams 82 | Glyma16g: 30000 protein |
| 23 | Williams 82 | Glyma16g: 30020; CDS |
| 24 | Williams82 | Glyma16g: 30020 protein |
| 25 | Hikmok | Glyma16g: 30000: 564321 . . . 567612 putative |
| | | promoter |
| 26 | Hikmok | Glyma16g: 30020: 573723 . . . 577171 putative |
| | | promoter |

[0298] Still, in accordance with a particular embodiment of the method for identifying, the amplifying comprises: a) admixing an amplification primer or amplification primer pair with a nucleic acid isolated from the first soybean plant or germplasm, wherein the primer or primer pair is complementary or partially complementary to at least a portion of the marker locus, and is capable of initiating DNA polymerization by a DNA polymerase using the soybean nucleic acid as a template; and, b) extending the primer or primer pair in a DNA polymerization reaction comprising a DNA polymerase and a template nucleic acid to generate at least one amplicon. Particuarly, the nucleic acid is selected from DNA or RNA.

[0299] According to a particular embodiment of the method ofr identifying, the amplifying step comprises employing a polymerase chain reaction (PCR) or ligase chain reaction (LCR) using a nucleic acid isolated from the first soybean plant or germplasm as a template in the PCR or LCR.

TABLE 7
List of primer sequences for gene markers

| SEQ ID. | | |
|---|---|---|
| No. | Primer_ID | Primer Sequence |
| 2 | HiSil-del1_F | GAATTTTAAGTCAACAGACATGCAC |
| 3 | HiSil-del1_R | TTTCACGGTAAAAATTATCACCAAC |
| 4 | HiSil-del2_F | GCAGGGAGGCAACAAATTAACAAAC |
| 5 | HiSil-del2_R | TGTTTCACAATCTTTCTTCTCACACAC |
| 6 | HiSil-del3b_F | GGAGGATCGCGACCATCATACTTTC |
| 7 | HiSil-del3b_R | TTCCACACCCTCACACATGATTGTA |
| 8 | HiSil-ins1_F | TGTCGCGTTAAATTCGTATGTTTG |
| 9 | HiSil-ins1_R | TCAAATTAAAGGCATGAGGATTTTGG |
| 10 | HiSil-Del_F | CCCACATCATTTTGACTTAACACTAG |
| 11 | HiSil-Del_R | TCTTCTTAGTTCTTAGATTCTCGCAC |

[0300] In accordance with a further aspect of the invention, there is provided CAPS (Cleaved Amplified Polymorphic Sequences) markers linked to the HiSil gene. These markers are specifically cleaved by a restriction enzyme to yield distinct fragments in the Hisil gene of Hikmok sorip variety compared to the fragments in the wild-type gene of the Williams82 variety. Particularly, these markers can be found wih the use of the primers selected from: SEQ ID NO. 12-13 (Table 8), and 27-277 (Table 19) and probes selected from: SEQ ID NOs. 278-495 (Table 19).

TABLE 8
List of primer sequences for CAPS markers.

| SEQ ID | | |
|---|---|---|
| No. | Primer_ID | Sequence |
| 12 | HiSil-Mboll_F | CCTTTTATGTCTCTTCCGTTTGAAAAGC |
| 13 | HiSil-Mboll_R | AAGTATGATGGTCGCGATCCTCCTCC |

Alleles & haplotypes

[0301] Allele mining was performed in 328 diverse soybean accessions belonging to different soybean maturity groups. Several haplotype groups were identified based on allelic variation in the coding sequences of Glyma16g:30000 and Glyma16g:30020.

[0302] In accordance with a further aspect of the invention, there is provided an H1 allele in the coding sequences of Glyma16g:30000 and Glyma16g:30020. Plants that carried the haplotype H1 were found to accumulate high levels of Si, thus confirming the association of haplotype H1 with high Si uptake capacity in soybean. Particularly, the H1 haplotype can be defined by at least one of a nucleic acid selected from the group consisting of: G (33672717), A (33673022), G (33673483), C (33681630), T (33681946), T (33681961), T (33682500), G (33683047), and C (33683049).

[0303] Five accessions were found to carry haplotype (H1) similar to Hikmok sorip. Plants from the entire set of accessions carrying haplotype H1 similar to Hikmok sorip were found to accumulate high levels of Si, thus confirming the association of haplotype H1 with high Si uptake capacity in soybean. The H1 and other haplotypes were defined by the single nucleotide variations present at positions 33672717, 33673022, 33673483, 33681630, 33681946, 33681961, 33682500, 33683047, and/or 33683049 of the HiSil gene (SEQ ID NO: 14 or 16). The nucleotides present at these positions are provided in Table 9. These haplotypes can be characterized by sequencing of the region, primers designed for the variation and several other techniques to detect variation, as is well known in the art.

TABLE 9
Nucleotides representative of haplotype H1 (i.e. Hikmok sorip)
and amino acid changes.

| | Glyma16g30000 | | | Glyma16g30020 | | | | | |
|---|---|---|---|---|---|---|---|---|---|
| | SEQ ID NO. 16 | | | SEQ ID NO. 14 | | | | | |
| Haplo-group | 33672717 | 33673022 | 33673483 | 33681630 | 33681946 | 33681961 | 33682500 | 33683047 | 33683049 |
| H5 | T | T | A | T | A | C | C | C | T |
| (Williams 82) | | | | | | | | | |
| H1 | G | A | G | C | T | T | T | G | C |
| (Hikmok sorip) | | | | | | | | | |

| | SEQ ID NO. 17 | | | SEQ ID NO. 15 | | | | |
|---|---|---|---|---|---|---|---|---|
| Amino Acid | — | L322H | E431G | L5P | — | — | T295I | L439V |
| Change in H1 | | | | | | | | |

TABLE 10
Allelic variation for the three candidate genes identified in Hisil QTL
governing Si accumulation in soybean

| SEQ ID. | | Synony- | Non- | |
|---|---|---|---|---|
| No. | | mous | Synonymous | Amino acid |
| (DNA, AA) | Gene ID | SNP | SNP | changes |
| | Glyma16g29990 | 2 | — | No difference |
| 16, 17 | Glyma16g30000 | 1 | 2 | L322H, E431G |
| 14, 15 | Glyma16g30020 | 3 | 3 | L5P, T295I, |
| | | | | L439V |

[0304] The HiSil protein sequence (SEQ ID NO. 15 or 17) has 57% homology with the low Si transporter 2 (Lsi2, efflux Si transporter) identified in rice (rice being a monocot). When looking at HiSil homologs in dicots (like soya), one can see around 70% homology. Therefore, the present invention encompasses plants comprising a HiSil protein sequence having greater than 60% homology to SEQ ID NO: 15 or 17 in monocots and greater than 70% homology to SEQ ID NO: 15 or 17 in dicots.

[0305] Alternatively, according to a particular embodiment of the invention, the plant comprises a H1 haplotype, provided that it is not Hikmok scrip.

### Methods for Developing HiSil Soybean Varieties

[0306] Therefore, in accordance with a further embodiment, the present invention provides a method for developing a soybean variety with high silicon uptake, the method comprising the step of: a) crossing a first variety of soybean having low Si uptake with a second variety of soybean comprises a marker, wherein the marker comprises a nucleic acid comprising at least one single nucleotide polymorphism (SNP) at a position on chromosome 16 from 33104446 bp to 35762786 bp; and b) selecting a progeny comprising the marker; wherein the progeny comprising the marker has high Si uptake.

[0307] Therefore, according to a further embodiment, the present invention provides a method for developing a soybean plant having high silicon uptake, the method comprising the step of: a) grafting a first variety of soybean having low Si uptake with a second variety of soybean having high Si uptake inasmuch as it comprises a nucleic acid sequence originating from a region on chromosome 16, from 33104446 bp to 35762786 bp.

[0308] Still, in accordance with an alternative embodiment, the present invention provides a method for genetically modifying a line of soybean having low Si uptake for the purpose of creating a line with high silicon uptake, the method comprising the step of introducing in the plant a nucleic acid originating from a region on chromosome 16 from 33104446 bp to 35762786 bp of i-iikmok scrip soybean variety (e.g. any gene selected from Table 5, particularly Glyma16g29990, Glyma16g30000, Glyma16g30020.

### Methods for Producing a Si High Accumulation Plant

[0309] In accordance with a further alternative embodiment, the invention provides a method for producing a Glycine max plant having a HiSil trait, the method comprising the steps of: a) providing a first Glycine max plant line, or progeny thereof comprising an H1 haplotype; b) crossing the Glycine max plant provided in step a) with a second Glycine max plant; c) collecting the seeds resulting from the cross in step b); d) regenerating the seeds of c) into plants; e) providing one or more backcross generations by crossing the plants of step d) or selfed offspring thereof with Glycine max breeding material to provide backcross plants; f) selfing plants of step e) and growing the selfed seed into plants; g) evaluating the plants of step f) for high silicon uptake (i.e. HiSII trait); and h) identifying and selecting plants that are high accumulators of Si.

[0310] Alternatively, the present invention provides a method for producing seeds that result in Glycine max plants having a HiSil trait, the method comprising the steps of: a) providing a first Glycine max plant line, or progeny thereof comprising an H1 haplotype; b) crossing the Glycine max plant provided in step a) with a second Glycine max plant; c) collecting the seeds resulting from the cross in step b); d) regenerating the seeds of c) into plants; e) providing one or more backcross generations by crossing the plants of step d) or selfed offspring thereof with Glycine max breeding material to provide backcross plants; f) selfing plants of step e) and growing the selfed seed into plants; and g) selecting and identifying seeds that result in Glycine max plants that are high accumulators of Si. Particularly, the H1 haplotype Glycine max plant is selected from any one of: PI372415A, PI209332, PI404166, PI437655, PI89772, PI90763 or a progeny thereof.

[0311] According to a further alternative embodiment, the invention provides a method of producing a soybean plant having increased Si uptake, the method comprising the steps of: a) crossing a first Glycine max plant having high Si uptake with a second Glycine max plant having low Si uptake, wherein the first Glycine max plant comprises in its genome a chromosomal interval comprising a H1 haplotype; and b) producing a progeny plant from the plant cross of a), wherein the progeny plant comprises in its genome a chromosomal interval comprising a H1 haplotype; thereby producing a soybean plant having increased Si uptake. Particularly, the first Glycine max plant comprises a chromosomal interval associated with Si accumulation corresponding to a genomic region from Hikmok sorip chromosome 16 as defined herein. Particuarly, the first Glycine max plant is any one of: PI372415A, PI209332, PI404166, PI437655, PI89772, PI90763 or a progeny thereof.

[0312] According to a particular embodiment, the first Glycine max plant comprises a Si concentration of at least about 1% Si concentration in leaf when the soybean variety is provided with a supply of Si at a concentration of about 0.8mM under hydroponic conditions. Particulary or alternatively, the second Glycine max plant having low Si uptake comprises a Si concentration less than 1% Si concentration in leaf when the plant is provided with a supply of Si at a concentration of about 0.8mM under hydroponic conditions.

[0313] In accordance with a further alternative embodiment, this method comprises further steps including: isolating a nucleic acid from the progeny plant of b); genotyping the nucleic acid for the presence of a molecular marker associated with Si accumulation in the plant, as defined herein.

[0314] In accordance with an alternative embodiment, the invention further provides a method of producing a Glycine max plant with high silicon uptake, the method comprising the steps of: a) isolating a nucleic acid from a Glycine max plant; b) genotyping the nucleic acid of a); c) identifying a plant as comprising at least one molecular marker associated with increased Si uptake as defined herein; and d) producing a Glycine max progeny plant from the plant of c) identified as having the molecular marker associated with increased Si uptake.

[0315] A method of producing a Glycine max plant having increased silicon uptake, the method comprising the steps of: a) introducing into a Glycine max plant's genome a chromosomal interval as defined herein; b) selecting for a Glycine max plant, plant germplasm or plant seed comprising the chromosomal interval of a) by isolating a nucleic acid from the plant and genotyping the nucleic acid for a molecular marker which associates with the presence of the chromosomal interval as well as the trait of increased Si uptake; and c) producing a Glycine max plant having increased silicon uptake. Particuarly, the plant or seed produced is an elite soybean variety.

[0316] In accordance with a particular embodiment, there is provided a method of producing a plant having increased silicon uptake, the method comprising the steps of: a) introducing into a plant's genome a nucleic acid encoding a HiSil protein; b) selecting for a plant, plant germplasm or plant seed comprising the nucleic acid of a); and c) producing a plant having increased silicon uptake. Particularly, the nucleic acid sequence encodes a protein sequence having 60%, 65%, 70%, 75%, 80%, 85%, 90%, 95%, 99, or 100% sequence identity to any one of SEQ ID NOs: 15 or 17. More particularly, the nucleic acid comprisies a sequence having 60%, 65%, 70%, 75%, 80%, 85%, 90%, 95%, 99, or 100% sequence identity to any one of SEQ ID NOs: 14 or 16.

[0317] According to a further embodiment, provided is a method of producing a disease-resistant plant, the method comprising the step of: stably introducing into a plant genome the plant expression cassette as described herein, wherein the introduction of the plant expression cassette confers increased Si uptake in the plant; thereby producing a disease-resistant plant.

[0318] In accordance with a particular embodiment, there is provided a method of producing a plant with increased yield, the method comprising the steps of: stably introducing into a plant genome the plant expression cassette as described herein, wherein the introduction of the plant expression cassette confers increased Si uptake in the plant; thereby producing a plant with increased yield.

[0319] In accordance with a particular embodiment, there is provided a method for producing a soybean plant with increased Si uptake, the steps comprising: a) introducing into a plant cell a recombinant DNA molecule comprising a polynucleotide encoding a polypeptide, wherein the nucleotide sequence of the polynucleotide is selected from the group consisting of: i) a nucleotide sequence set forth as SEQ ID NO: 14 or 16; ii) a nucleotide sequence encoding a protein having the amino acid sequence of SEQ ID NO: 15 or 17; iii) a nucleotide sequence with at least 90%, at least 91%, at least 92%, at least 93%, at least 94%, at least 95%, at least 96%, at least 97%, at least 98%, at least 99% identity to SEQ ID NO: 14, or 16; and iv) a nucleotide sequence encoding a protein with at least 90%, at least 91%, at least 92%, at least 93%, at least 94%, at least 95%, at least 96%, at least 97%, at least 98%, at least 99% identity to SEQ ID NO: 15 and 17; and b) growing a plant from the plant cell.

### Introduction in Plants

[0320] In accordance with a further embodiment of the invention, there is provided a method of introducing a HiSil trait into a plant (such as a soybean plant), comprising: a) selecting a soybean plant comprising the HiSil gene as defined herein, or a nucleic acid sequence in its genome that encodes a protein having at least 80% sequence identity to SEQ ID NO: 17 or SEQ ID NO:15, wherein the protein comprises a Threonine at a position corresponding to position 295 of SEQ ID NO:15, and b) introducing a modification to the nucleic acid sequence such that the encoded protein comprises an Isoleucine at the position corresponding to position 295 of SEQ ID NO:15.

[0321] In accordance with a further embodiment of the invention, there is provided a method for producing a plant (such as a soybean plant) with increased Si uptake, the steps comprising: a) introducing into a plant cell a recombinant DNA molecule comprising a polynucleotide encoding a polypeptide, wherein the nucleotide sequence of the polynucleotide is selected from the group consisting of: i) a nucleotide sequence set forth as SEQ ID NO: 14 or 16; ii) a nucleotide sequence encoding a protein having the amino acid sequence of SEQ ID NO: 15 or 17; iii) a nucleotide sequence with at least 90%, at least 91%, at least 92%, at least 93%, at least 94%, at least 95%, at least 96%, at least 97%, at least 98%, at least 99% identity to SEQ ID NO: 14, or 16; and iv) a nucleotide sequence encoding a protein with at least 90%, at least 91%, at least 92%, at least 93%, at least 94%, at least 95%, at least 96%, at least 97%, at least 98%, at least 99% identity to SEQ ID NO: 15 and 17; and b) growing a plant from the plant cell.

[0322] Particularly, the HiSil nucleic acid sequence used in the present invention may comprise a nucleic acid sequence having 70%, 75%, 80%, 85%, 90%, 95%, 99% sequence identity with SEQ ID NO: 14 or 16 wherein introduction into the genome of a plant confers increased Si accumulation in the plant. More particularly, the HiSil protein used in the present invention may comprise a amino acid sequence having 70%, 75%, 80%, 85%, 90%, 95%, 99% sequence identity with SEQ ID NO: 15 and/or 17 wherein expression of the gene in a plant confers increased Si accumulation in the plant.

[0323] The HiSil gene may be introduced into any plant genome either by traditional breeding or transgenic technologies that are well known in the art. As well, introduction may be accomplished by any manner known in the art, including: introgression, transgenic, or site-directed nucleases (SDN). Particularly, the modification to the nucleic acid sequence is introduced by way of site-directed nuclease (SDN). More particularly, the SDN is selected from: meganuclease, zinc finger, Transcription activator-like effector nucleases system (TALEN) or Clustered Regularly Interspaced Short Palindromic Repeats system (CRISPR) system.

### Genome Editing

[0324] SDN is also referred to as “genome editing”, or genome editing with engineered nucleases (GEEN). This is a type of genetic engineering in which DNA is inserted, deleted or replaced in the genome of an organism using engineered nucleases that create site-specific double-strand breaks (DSBs) at desired locations in the genome. The induced double-strand breaks are repaired through nonhomologous end-joining (NHEJ) or homologous recombination (HR), resulting in targeted mutations (‘edits’). Particularly SDN may comprises techniques such as: Meganucleases, Zinc finger nucleases (ZFNs), Transcription Activator-Like Effector-based Nucleases (TALEN) (Feng et al. 2013, Joung & Sander 2013), and the Clustered Regularly Interspaced Short Palindromic Repeats (CRISPR-Cas) system.

[0325] In according with this particular method, the nucleic acid may be introduced into the plant genome by either CRISPR, TALEN, meganucleases or through specific modification of genomic nucleic acids. Most particularly, introduction of the nucleic acid is accomplished by heterologous or transgenic gene expression.

### Transgenic

[0326] According to a particular embodiment, there is further provided a method of producing a plant having increased silicon uptake, the method comprising the steps of: introducing into a plant's genome a nucleic acid encoding a HiSil protein; selecting for a plant, plant germplasm or plant seed comprising the nucleic acid of a); and producing a plant having increased silicon uptake.

[0327] Alternatively, the invention also provided a method of producing a disease resistant plant, the method comprising the step of: stably introducing into a plant genome the plant expression cassette as described herein, wherein the introduction of the plant expression cassette confers increased Si uptake in the plant; thereby producing a disease resistant plant.

[0328] Alternatively, also provided is a method of producing a plant with increased yield, the method comprising the step of: stably introducing into a plant genome the plant expression cassette as described herein, wherein the introduction of the plant expression cassette confers increased Si uptake in the plant; thereby producing a plant with increased yield. Accordingly, there is also provided a transgenic plant or a transgenic seed comprising the plant expression cassette as defined herein

[0329] Still in accordance with this particular embodiment, the invention therefore provides an agronomically elite soybean seed which is the progeny of a transgenic female ancestor soybean plant having in its genome a recombinant DNA which expresses a Si transporter comprising an amino acid sequence as defined herein, particularly an amino acid sequence with at last about 80%, 90%, 95%, 99% or 100% sequence identity to the amino acid sequence of any one of SEQ ID NOs: 15 or 17. More particularly, the protein is active in root tissue. Most particularly, the protein confers Si accumulation in any one of the plant leaves, plant stem or plant parts.

### Expression Cassettes

[0330] According to a particular embodiment, the nucleic acid of the present invention is introduced into the plant's genome by a plant expression cassette.

[0331] In accordance with a further aspect of the invention, there is provided an expression cassette for introduction and expression in the plant, the expression cassette comprising the nucleic acid encoding for the HiSil gene operably linked to a plant promoter sequence. Particularly, the invention provides a plant expression cassette comprising the isolated polynucleotide encoding a Si transporter as defined herein, particularly a polynucleotide selected from the group consisting of SEQ ID NOs: 14 and 16, or a polynucleotide encoding a protein having 60%, 70%, 80%, 90%, 95%, or 99% sequence identity to any one of SEQ ID NO: 15 or SEQ ID NO: 17. More particularly, the expression cassette encodes a polypeptide selected from the group consisting of SEQ ID NOs: 15 or 17.

[0332] According to a particular embodiment, the expression cassette comprises a nucleic acid that encodes a polypeptide with an amino acid sequence comprising SEQ ID NO 17, where the polypeptide further comprises at least one amino acid corresponding to a histidine at position 322 or a glycine at position 431. Particularly, the plant expression cassette's DNA has at least one allelic modification to the polynucleotide native template encoding a polypeptide comprising SEQ ID NO: 17 wherein the polynucleotide allelic modification results in any one of the amino acid changes selected from the group consisting of: a histidine at position 322 or a glycine at position 431.

[0333] According to an alternative embodiment, the expression cassette comprises a nucleic acid that encodes a polypeptide with an amino acid sequence comprising SEQ ID NO 15 and further wherein the polypeptide comprises at least one amino acid corresponding to a proline at position 5, an isoleucine at position 295 or a valine at position 439. Particularly, the plant expression cassette's DNA has at least one allelic modification to the polynucleotide native template encoding a polypeptide comprising SEQ ID NO: 15 wherein the polynucleotide allelic modification results in any one of the amino acid changes selected from the group consisting of: a proline at position 5, an isoleucine at position 295 or a valine at position 439.

[0334] More particularly, the expression cassette is introduced into the plant genome by genome editing such as, for example: meganucleases, zinc finger nucleases (ZFNs), transcription activator-like effector nucleases (TALENs), and the Cas9-guideRNA system (adapted from the CRISPR prokarotic immune system), or through specific modification of genomic nucleic

[0335] In accordance with an alternative embodiment, the plant expression comprises the polynucleotide as defined herein, operably linked to a native or non-native promoter. Particularly, the plant expression cassette comprises the polynucleotide as defined herein, that is operably-linked to a root-specific or root-preferred promoter, particularly, a promoter as defined herein.

[0336] In accordance with an alternative embodiment, the invention provides a vector comprising the plant expression cassette as defined herein.

### Promoters

[0337] A promoter is a region of DNA or DNA sequence that initiates transcription of a particular gene. Promoters are located near the transcription start sites of genes, on the same strand and upstream on the DNA (towards the 5′ region of the sense strand). Promoters can be about 100-1000 base pairs long. In the present invention, native or non-native promoter can initiate transcription of the HiSil gene in plants.

[0338] The native promoter refers to a promoter that is naturally and/or originally present in a cell and it is typically designated for the expression of a particular gene, such as one that is encoded in the natural original genome of the cell. Therefore, in addition to the nucleic acid, an operably-linked root-specific or root-preferred promoter is introduced into the plant genome, particularly an operably linked HiSil promoter sequence is introduced into the plant genome.

[0339] Particularly, the HiSil promoter sequence comprises a nucleic acid sequence defined by SEQ ID NO: 18, 19 or 20. More particularly, the promoter comprises a nucleic acid having 70%, 75%, 80%, 85%, 90%, 95%, 99% sequence identity with SEQ ID NO: 18, 19 or 20. In particular, the promoter sequence comprises a nucleic acid sequence comprising a nucleic acid having 60%, 65%, 70%, 75%, 80%, 85%, 90%, 95%, 99% sequence identity with SEQ ID NO: 18, 19 or 20,

[0340] A non-native promoter can be a promoter not originally present in a cell and that has been inserted artificially into the cell such as a promoter of a gene that is not naturally associated with the gene. Particularly, the promoter sequence is a root-specific or a root-preferred promoter. More particularly, the root-specific or root-preferred promoter is selected from the group consisting of: RCc3, PHT1, MtPT1, MtPT2, Pyk10, Beta-tubulin, LRX1, BTG-26, LeAMT1, LeNRT1-1, KDC1, TobRb7, OsRAB5a, ALFS, NRT2, RB7, RD2 and Gns1 glucanase root promoter. Other examples of root-specific promoters include, but are not limited to, the RB7 and RD2 promoters described in U.S. Pat. Nos. 5,459,252 and 5,837,876 respectively.

[0341] Still, the promoter can be selected from: RolD promoter, RolD-2 promoter, glycine rich protein promoter, GRP promoter, ADH promoter, maize ADH1 promoter, PHT promoter, Phtl gene family promoter, metal uptake protein promoter, maize metallothionein protein promoter, 35S CaMV domain A promoter, pDJ3S promoter, SIREO promoter, pMe1 promoter, Sad1 promoter, Sad2 promoter, TobRB7 promoter, RCc3 promoter, FaRB7 promoter, SPmads promoter, IDS2 promoter, pyk10 promoter, Lbc3 leghemoglobin promoter, PEPC promoter, Gnsl glucanase root promoter, 35S2 promoter, G14 promoter, G15 promoter, and GRP promoter.

### Introgression or Breeding

[0342] In accordance with a particular embodiment, the method of the present invention is carried out where introduction of the nucleic acid is accomplished by plant introgression, plant breeding or marker assisted breeding (MAB).

### Method for Growing a Si High Accumulation Plant

[0343] According to a particular embodiment, the present invention further provides a method for growing a plant, comprising the steps of: a) providing the plant as defined herein, or the seed as defined herein; b) growing a plant therefrom; and c) irrigating the plant with a silicon soil amendment.

[0344] In particular, the silicon soil amendment can be selected from the group consisting of: mine slag, wollastonite, steel mills slag, crushed rock, calcium silicate, magnesium silicate, amorphous diatomaceous earth (DE), calcium magnesium silicate, phosphorous furnace byproduct, calcium silicate, potassium silicate, silicic acid, organic silicone, sodium silicate. More particularly, the silicon soil amendment can be selected from: Ca₂SiO₄, CaSiO₂, SiO₂, CaSiO₃, MgSiO₃, or K₂SiO₃, (Si(OH)₄, H₄SiO₄, and R₂SiO, wherein R is an organic group such as methyl, ethyl, or phenyl.

[0345] According to a particular embodiment, the present invention provides a method of growing a crop (such as a soybean crop), the method comprising the steps of: a) planting in a field the soybean plant as described herein; and b) pplying a compound to the field that comprises silicon: i) prior to planting, ii) at planting, or iii) after planting.

[0346] According to a particular embodiment, there is provided a method of growing a soybean crop, the method comprising: a) selecting a location for planting the soybean crop, wherein the location comprises soil, the soil having a silicon concentration at a level of at least 7 ppm, at least 10 ppm, at least 15 ppm, at least 20 ppm, at least 30 ppm, at least 40 ppm or at least 50 ppm and b) planting and growing the soybean plant as described herein.

### Si Soil Amendment and Si Constituent or Source

[0347] According to a particular embodiment, the Si amendment may comprise a silicon concentration at a level of: at least 0.4 mM, at least about 0.5 mM, at least about 0.6 mM, at least about 0.7 mM, or at least about 0.8 mM.

[0348] Particularly, the Si constituent of the soil amendment comes a source selected from the group comes from: mine slag, wollastonite, steel mills slag, crushed rock, calcium silicate, magnesium silicate, amorphous diatomaceous earth (DE), calcium magnesium silicate, phosphorous furnace byproduct, calcium silicate, potassium silicate, silicic acid, organic silicone, sodium silicate. More particularly, the Si source is selected from: Ca₂SiO₄, CaSiO₂, SiO₂, CaSiO₃, MgSiO₃, or K₂SiO₃, (Si(OH)₄, H₄SiO₄, and R₂SiO, wherein R is an organic group such as methyl, ethyl, or phenyl.

### Kit for Combined Sale

[0349] In accordance with a further aspect of the invention there is provided a kit for he combined sale of a seed of the plant as defined herein, and at least one constituent for making a Si soil amendment. In accordance with a particular aspect, the kit further comprises instructions on how to dilute the silicon constituent in a liquid such as water, for making the silicon soil amendment; and, optionally instructions for irrigating the plants.

### List of Specific Embodiments

[0350] In accordance with a further aspect of the invention, the following specific embodiments are provided:
[0351] 1. An elite HiSil Glycine max plant wherein said elite HiSil Glycine max plant comprises in its genome a chromosomal interval comprising a H1 haplotype.
[0352] 2. An elite HiSil Glycine max plant wherein said elite HiSil Glycine max plant comprises in its genome a chromosomal interval associated with Si accumulation corresponding to a genomic region or portion thereof from Hikmok sorip chromosome 16 at about 92.6 cM to about 132 cM distance as indicated on a genetic linkage map from Hikmok sorip (PI372415A).
[0353] 3. An elite HiSil Glycine max plant wherein said elite HiSil Glycine max plant comprises in its genome a chromosomal interval associated with Si accumulation corresponding to a genomic region or portion thereof from Hikmok sonp chromosome 16 corresponding to physical positions 31.15M base-pairs to 36.72 M base-pairs of Williams82 reference genome.
[0354] 4. The plant of any one of paragraphs 1-3, wherein the elite Glycine max is a commercially elite Glycine max variety having a commercially significant yield.
[0355] 5. The plant of any one of paragraphs 1-4, wherein the chromosomal interval comprises any one of, or a portion of nucleotide base pairs corresponding to positions: 1-2658341 of SEQ ID NO: 1; 567613-569933 of SEQ ID NO: 1; 564321-567612 of SEQ ID NO: 1; 577172-579696 of SEQ ID NO: 1; or 573723-577171 of SEQ ID NO: 1.
[0356] 6. The plant of any one of paragraphs 1-5, wherein said plant has increased Si accumulation in any one of the plant leaves, plant stem or plant parts as compared to a LoSil plant.
[0357] 7, The plant of paragraph 6, wherein said plant has at least 1.2×, 1.5×, 2×, 3× or higher Si accumulation compared to a LoSil plant.

[0358] 18. The plant of any one of paragraphs 1-7, wherein at least one parental line of said plant was selected or identified by a molecular marker located within 20 cM, 10 cM, ScM, 1 cM or 0.5 cM of said chromosomal interval, wherein said molecular marker is associated with Si accumulation in said plant.
[0359] 9. The plant of paragraph 8, wherein the molecular marker is a single nucleotide polymorphism (SNP), a quantitative trait locus (QTL), an amplified fragment length polymorphism (AFLP), randomly amplified polymorphic DNA (RAPD), a restriction fragment length polymorphism (RFLP) or a microsatellite.
[0360] 10. The plant of any one of paragraphs 8-9, wherein the molecular marker is located within 20 cM, 10 cM, ScM, 1 cM or 0.5 cM of a single nucleotide polymorphism (SNP) marker associated with increased Si accumulation selected from the group consisting of: G(33672717), A(33673022), G(33673483), C(33681630), T(33681946), T(33681961), T(33682500), G(33683047), and C(33683049) as indicated on a genetic linkage map from Hikmok sonp (PI372415A).
[0361] 11. The plant of any one of paragraphs 1-10, wherein said plant comprises a Si concentration of at least about 1% Si concentration in leaf when said plant is provided with a supply of Si at a concentration of about 0.8 mM, under hydroponic conditions.
[0362] 12. The plant of any one of paragraphs 1-11, wherein the chromosomal interval is derived from any one of the plant lines selected from the group consisting of: PI372415A, PI209332, PI404166, PI437655, PI89772, PI372415A or PI90763.
[0363] 13. A progeny plant derived from the plant of any one of paragraphs 1-12.
[0364] 14. A plant cell, plant seed or plant part derived from the plant of any one of paragraphs 1-13.
[0365] 15. The plant of any one of paragraphs 1-14, wherein said plant has increased resistance to a stress selected from the group consisting of: diseases (such as powdery mildew, Pythium ultimum, Phytophthora root rot, leaf spot, blast, brown spot, root-knot nematode, soybean cyst nematode, soybean vein necrosis virus, soybean stem canker, soybean sudden death syndrome, leaf and neck blast, rust, frogeye leaf spot, brown stem rot, Fusarium, or sheath blight); insect pests (such as whitefly, aphid, grey field slug, sugarcane borer, green bug, or aphid); abiotic stress (such as drought tolerance, flooding, high level of salinity, heavy metal, aluminum, manganese, cadmium, zinc, UV-B, boron, iron deficiency chlorosis or cold tolerance (i.e. extreme temperatures)).
[0366] 16. The plant of any one of paragraphs 1-13 or 15, wherein said plant has improved agronomical traits such as seedling vigor, yield potential, phosphate uptake, plant growth, seedling growth, phosphorus uptake, lodging, reproductive growth, or grain quality.
[0367] 17, An elite Glycine max plant wherein said plant comprises a HiSil trait.
[0368] 18. An elite HiSil Glycine max plant comprising a HiSil allele which confers increased Si uptake, and wherein the HiSil allele comprises at least one single nucleotide polymorphism (SNP) selected from the group consisting of A(33673022), G(33673483), C(33681630), T(33682500), G(33683047), and C(33683049) as indicated on a genetic linkage map from Hikmok sorip (PI372415A).
[0369] 19. The plant of paragraph 18, wherein the chromosome interval comprises any one of, or portion of nucleotide base pairs corresponding to positions: 1-2658341 of SEQ ID NO: 1; 567613-569933 of SEQ ID NO: 1; 564321-567612 of SEQ ID NO: 1; 577172-579696 of SEQ ID NO: 1; or 573723-577171 of SEQ ID NO: 1.
[0370] 20. A method for producing a Glycine max plant having a HiSil trait, the method comprising the steps of:
   [0371] a) providing a first Glycine max plant line, or progeny thereof comprising an H1 haplotype;
   [0372] b) crossing the Glycine max plant provided in step a) with a second Glycine max plant;
   [0373] c) collecting the seeds resulting from the cross in step b);
   [0374] d) regenerating the seeds of c) into plants;
   [0375] e) providing one or more backcross generations by crossing the plants of step d) or selfed offspring thereof with Glycine max breeding material to provide backcross plants;
   [0376] f) selfing plants of step e) and growing the selfed seed into plants;
   [0377] g) evaluating the plants of step f) for high silicon uptake (i.e. HiSil trait); and
   [0378] h) identifying and selecting plants that are high accumulators of Si.
[0379] 21. A method for producing seeds that result in Glycine max plants having a HiSil trait, the method comprising the steps of:
   [0380] a) providing a first Glycine max plant line, or progeny thereof comprising an H1 haplotype;
   [0381] b) crossing the Glycine max plant provided in step a) with a second Glycine max plant;
   [0382] c) collecting the seeds resulting from the cross in step b);
   [0383] d) regenerating the seeds of c) into plants;
   [0384] e) providing one or more backcross generations by crossing the plants of step d) or selfed offspring thereof with Glycine max breeding material to provide backcross plants;
   [0385] f) selfing plants of step e) and growing the selfed seed into plants; and
   [0386] g) selecting and identifying seeds that result in Glycine max plants that are high accumulators of Si.
[0387] 22. The method of paragraph 20 or 21, wherein the H1 haplotype Glycine max plant is selected from any one of: PI372415A, PI209332, PI404166, PI437655, PI89772, PI90763 or a progeny thereof.
[0388] 23. A method of producing a soybean plant having increased Si uptake, the method comprising the steps of:
   [0389] a) crossing a first Glycine max plant having high Si uptake with a second Glycine max plant having low Si uptake, wherein said first Glycine max plant comprises in its genome a chromosomal interval comprising a H1 haplotype; and
   [0390] b) producing a progeny plant from the plant cross of a), wherein said progeny plant comprises in its genome a chromosomal interval comprising a H1 haplotype;
[0391] thereby producing a soybean plant having increased Si uptake.
[0392] 24. The method of paragraph 23, wherein the first Glycine max plant comprises a chromosomal interval associated with Si accumulation corresponding to a genomic region from Hikmok sorip chromosome 16 at about 92.6 cM to about 132 cM distance or from physical positions 33.15M base-pairs to 36.72M base-pairs as indicated on a genetic linkage map from Hikmok sorip (PI372415A).
[0393] 25. The method of any one of paragraphs 20-24, wherein the first Glycine max plant is any one of: PI372415A, PI209332, PI404166, PI437655, PI89772, PI90763 or a progeny thereof.
[0394] 26. The method of any one of paragraphs 24, wherein the chromosomal interval comprises any one of, or portion of nucleotide base pairs corresponding to positions: 1-2658341 of SEQ ID NO: 1; 567613-569933 of SEQ ID NO: 1; 564321-567612 of SEQ ID NO: 1; 577172-579696 of SEQ ID NO: 1; or 573723-577171 of SEQ ID NO: 1.
[0395] 27. The method of any one of paragraphs 20-26, wherein the first Glycine max plant comprises a Si concentration of at least about 1% Si concentration in leaf when said soybean variety is provided with a supply of Si at a concentration of about 0.8 mM under hydroponic conditions.
[0396] 28. The method of paragraphs any one of 20-27, wherein the second Glycine max plant having low Si uptake comprises a Si concentration less than 1% Si concentration in leaf when said plant is provided with a supply of Si at a concentration of about 0.8 mM under hydroponic conditions.
[0397] 29. The method of any one of paragraphs 20-28, comprising further steps including isolation of a nucleic acid from the progeny plant of b); genotyping said nucleic acid for the presence of a molecular marker located within 20 cM, 10 cM, 5 cM, 1 cM or 0.5 cM of the chromosomal interval corresponding to a genomic region from Hikmok sorip chromosome 16 at about 92.6 cM to about 132 cM distance or from physical positions 33.15M base-pairs to 36.72M base-pairs or a portion thereof as indicated on a genetic linkage map from Hikmok sorip (PI372415A), further wherein said molecular marker is associated with Si accumulation in said plant.
[0398] 30. The method of paragraph 29, wherein the molecular marker is located within 20 cM, 10 cM, 5 cM, 1 cM or 0.5 cM of a single nucleotide polymorphism (SNP) marker associated with increased Si accumulation selected from the group consisting of: A(33673022), G(33673483), C(33681630), T(33682500), G(33683047), and C(33683049) corresponding to a chromosomal interval from Hikmok sorip chromosome 16 at about 92.6 cM to about 132 cM distance or from physical positions 33.15 Mb base-pairs to 36.72 Mb base-pairs as indicated on a genetic linkage map from Hikmok sorip (PI372415A)
[0399] 31. A method of producing a Glycine max plant with high silicon uptake, the method comprising the steps of:
   [0400] a) isolating a nucleic acid from a Giycine max plant;
   [0401] b) genotyping the nucleic acid of a)
   [0402] c) identifying a plant as comprising at least one molecular marker associated with increased Si uptake wherein said molecular marker is located within 20 cM, 10 cM, 5 cM, 1 cM or 0.5 cM of a chromosomal interval corresponding to a genomic region from Hikmok sorip chromosome 16 at about 92.6 cM to about 132 cM distance; or from physical positions 33.15Mb base-pairs to 36.72Mb base-pairs, or portion thereof as indicated on a genetic linkage map from Hikmok sorip (PI372415A); and
   [0403] d) producing a Glycine max progeny plant from the plant of c) identified as having said molecular marker associated with increased Si uptake.
[0404] 32. A method of producing a Glycine max plant having increased silicon uptake, said method comprising the steps of:
   [0405] a) introducing into a Glycine max plant's genome a chromosomal interval comprising a nucleic add comprising nucleotide base pairs corresponding to positions: 1-2658341 of SEQ ID NO: 1; 567613-569933 of SEQ ID NO: 1; 564321-567612 of SEQ ID NO: 1; 577172-579696 of SEQ ID NO: 1; or 573723-577171 of SEQ ID NO: 1; b) selecting for a Glycine max plant, plant germplasm or plant seed comprising the chromosomal interval of a) by isolating a nucleic acid from said plant and genotyping the nucleic add for a molecular marker which associates with the presence of the chromosomal interval as well as the trait of increased Si uptake; and c) producing a Glycine max plant having increased silicon uptake.
[0406] 33. The method of paragraph 31 or32, wherein the molecular marker is located within 20 cM, 10cm, 5 cM, 1 cM, 0.5 cM or within said chromosomal interval or said marker is located within 20 cM, 10 cM, 5 cM, 1 cM or 0.5 cM of a SNP selected from the group consisting of: A(33673022), G(33673483), C(33681630), T(33682500), G(33683047), and C(33683049) corresponding to a genomic region from Hikmok sorip chromosome 16 at about 92.6 cM to about 132 cM distance or from physical positions 33.15 Mb base-pairs to 36.72 Mb base-pairs, or portion thereof as indicated on a genetic linkage map from Hikmok sorip (PI372415A).
[0407] 34. The method of paragraph 30-33, wherein the plant or seed produced comprises at least one SNP from the group consisting of: A(33673022), G(33673483), C(33681630), T(33682500), G(33683047), and C(33683049) corresponding to a genomic region from Hikmok sorip chromosome 16 at about 92.6 cM to about 132 cM distance or from physical positions 33.15Mbase-pairs to 36.72M base-pairs, or portion thereof as indicated on a genetic linkage map from Hikmok sorip (PI372415A).
[0408] 35. The method of paragraphs 20-34, wherein the plant or seed produced is an elite soybean variety.
[0409] 36. A plant, plant part, or plant seed produced by the method of paragraphs 20-35.
[0410] 37. A method of producing a Glycine max plant with high silicon uptake, the method comprising the steps of:
   [0411] a) isolating a nucleic acid from a Glycine max plant;
   [0412] b) genotyping the nucleic acid of a)
   [0413] c) identifying a plant as comprising at least one molecular marker associated with the presence of a Si transporter gene wherein the gene encodes a protein comprising any one of SEQ ID NO: 15 or SEQ ID NO: 17; and
   [0414] d) producing a Glycine max progeny plant from the plant of c) identified as having said molecular marker associated with increased Si uptake.
[0415] 38. A method of controlling any one of the following diseases in a soybean crop: Asian soybean rust, soy cyst nematode, nematode, rust, smut, Golovinomyces cichoracearum, Erysiphe cichoracearum, Blumeria graminis, Podosphaera xanthii, Sphaerotheca fuliginea, Pythium ultimum, Uncinula necator, Mycosphaerella pinodes, Magnaporthe grisea, Bipolans oryzae, Magnaporthe grisea, Rhizoctonia solani, Phytophthora sone, Schizaphis graminum, Bemisia tabaci, Rhopalosiphum maidis, Deroceras reticulatum, Diatraea saccharalis, Schizaphis graminum and Myzus persicae, the method comprising the steps of:
   [0416] a) planting in a field an soybean plant as described in any one of paragraphs 1-13, 15-19; or 36; and
   [0417] b) ensuring that said plant is provided with a supply of Si at a concentration of at least about 0.8 mM.
[0418] 39. A method of reducing abiotic stress damage in a soybean crop wherein the abiotic stress is caused by any one of the following: drought, flooding/excess water, high level of salinity, heavy metal, aluminum, manganese, cadmium, zinc, UV-B, boron, cold temperature, heat, or herbicide, the method comprising the steps of:
   [0419] a) planting in a field a soybean plant as described in any one of paragraphs 1-13; 15-19; or 36; and
   [0420] b) ensuring that said plant is provided with a supply of Si at a concentration of at least about 0.8mM.
[0421] 40. A method of increasing yield in a soybean crop, the method comprising the steps of:
   [0422] a) planting in a field a soybean plant as described in any one of paragraphs 1-13; 15-19; or 36; and
   [0423] b) ensuring that said plant is provided with a supply of Si at a concentration of at least about 0.8 mM.
[0424] 41. A method of growing a soybean crop, the method comprising the steps of:
   [0425] a) planting in a field a soybean plant as described in any one of paragraphs 1-13; 15-19; or 36; and
   [0426] b) applying a compound to the field that comprises silicon:
      [0427] i. prior to planting,
      [0428] ii. at planting, or
      [0429] iii. after planting.
[0430] 42. A method of growing a soybean crop, the method comprising planting in a field a soybean plant as described in any one of paragraphs 1-13; 15-19; or 36, wherein the soil of the field comprises silicon at the level of at least about 0.8 mM.
[0431] 43. A method of identifying or selecting a first soybean plant having increased Si uptake, the method comprising the steps of:
   [0432] a) isolating a nucleic acid from a first soybean plant;
   [0433] b) detecting in the nucleic acid the presence of a molecular marker that associates with increased Si uptake and wherein the molecular marker is: associated with a H1 haplotype; or located within 20 cM, 10 cM, ScM, 1 cM or 0.5 cM of a chromosomal interval corresponding to a genomic region from Hikmok sorip chromosome 16 at about 92.6 cM to about 132 cM distance; or located from physical positions 33.15M base-pairs to 36.72M base-pairs as indicated on a genetic linkage map from Hikmok sorip (PI372415A); and
   [0434] c) identifying or selecting said soybean plant on the basis of the presence of the molecular marker of b);
   [0435] thereby identifying or selecting a first soybean plant having increased Si uptake.
[0436] 44. The method of paragraph 43, wherein the molecular marker is a single nucleotide polymorphism (SNP), a quantitative trait locus (QTL), an amplified fragment length polymorphism (AFLP), randomly amplified polymorphic DNA (RAPD), a restriction fragment length polymorphism (RFLP) or a microsatellite.
[0437] 45. The method of paragraph 43 or 44, wherein the chromosomal interval comprises any one of, or a portion of a nucleic acid comprising nucleotide base pairs corresponding to positions: 1-2658341 of SEQ ID NO: 1; 567613-569933 of SEQ ID NO: 1; 564321-567612 of SEQ ID NO: 1; 577172-579696 of SEQ ID NO: 1; or 573723-577171 of SEQ ID NO: 1.
[0438] 46. The method of any one of paragraphs 43-45, wherein the plant identified or selected comprises at least one marker corresponding to:
   [0439] a) a genomic region from Hikmok sorip chromosome 16 at about 92.6 cM to about 132 cM distance; or a genomic region from physical positions 33.15M base-pairs to 36.72M base-pairs, or portion thereof as indicated on a genetic linkage map from Hikmok sorip (Pl372415A); or a SNP selected from the group consisting of: A(33673022), G(33673483), C(33681630), T(33682500), G(33683047), and C(33683049) of genes Glyma16g:30000 or Glyrna16g:30020.
[0440] 47. The method of paragraphs 43-46, wherein the chromosomal interval comprises a nucleic acid encoding a polypeptide with an amino acid sequence comprising SEQ ID NO. 15 and further wherein the polypeptide comprises at least one amino acid corresponding to a proline at position 5, an isoleucine at position 295 or a valine at position 439.
[0441] 48. The method of paragraphs 43-47, wherein the chromosomal interval comprises a nucleic acid encoding a polypeptide with an amino acid sequence comprising SEQ ID NO. 17 further, wherein the polypeptide comprises at least one amino acid corresponding to a histidine at position 322 or a glycine at position 431.
[0442] 49. The method of paragraphs 43-48, wherein the method is used in a commercial soybean plant breeding program.
[0443] 50. The method of paragraphs 43-49, wherein the detecting comprises detecting at least one allelic form of a polymorphic simple sequence repeat (SSR) or a single nucleotide polymorphism (SNP).
[0444] 51. The method of paragraphs 43-50, wherein the detecting comprises amplifying the marker locus or a portion of the marker locus and detecting the resulting amplified marker amplicon.
[0445] 52. The method of paragraph 51, wherein the amplifying comprises: a) admixing an amplification primer or amplification primer pair with a nucleic acid isolated from the first soybean plant or germplasm, wherein the primer or primer pair is complementary or partially complementary to at least a portion of the marker locus, and is capable of initiating DNA polymerization by a DNA polymerase using the soybean nucleic acid as a template; and, b) extending the primer or primer pair in a DNA polymerization reaction comprising a DNA polymerase and a template nucleic acid to generate at least one amplicon.
[0446] 53. The method of paragraph 52, wherein the nucleic acid is selected from DNA or RNA.
[0447] 54. The method of any one of paragraphs 51-53, wherein the amplifying comprises employing a polymerase chain reaction (PCR) or ligase chain reaction (LCR) using a nucleic acid isolated from the first soybean plant or germplasm as a template in the PCR or LCR.
[0448] 55. The method of any one of paragraphs 43-54, further comprising the step, wherein the chromosome interval associated with increased Si uptake is introgressed into a second soybean plant or germplasm to produce an introgressed soybean plant or germplasm having increased Si uptake wherein the introgressed soybean plant further comprises at least one of:
   [0449] a) a SNP marker selected from the group consisting of: A(33673022), G(33673483), C(33681630), T(33682500), G(33683047), and C(33683049) on genes Glyma30000 or 30020;
   [0450] b) a marker corresponding to a genomic region from Hikmok sorip chromosome 16 at about 92.6 cM to about 132 cM distance or
   [0451] c) from physical positions 33.15M base-pairs to 36.72M base-pairs, or portion thereof as indicated on a genetic linkage map from Hikmok sorip (PI1372415A).
[0452] 56. The method of paragraph 55, wherein the second soybean plant or germplasm displays low Si uptake as compared to the first soybean plant or germplasm, wherein the introgressed soybean plant or germplasm displays increased Si uptake as compared to the second plant or germplasm.
[0453] 57. The method of any one of any one of paragraphs 55-56, wherein the second soybean plant or germplasm comprises an elite soybean strain or an exotic soybean strain.
[0454] 58. The method of any one of any one of paragraphs 43-57, comprising electronically transmitting or electronically storing data representing the detected allele or molecular marker in a computer readable medium.
[0455] 59. The method of any one of paragraphs 43-58, wherein the molecular marker or allele is determined using TASSEL, GeneFlow, or MapManager-QTX software.
[0456] 60. The method of any one of paragraphs 43-59, wherein said chromosome interval comprises at least one single nucleotide polymorphism (SNP) selected from the group consisting of: A(33673022), G(33673483), C(33681630), T(33682500), G(33683047), and C(33683049) of Glyma16g:30000 or Glyma16g:30020 genes wherein presence of said SNP is associated with Si accumulation.
[0457] 61. The plant of paragraphs 1-13; 15-19; or 36, wherein said chromosomal interval comprises SEQ ID NO.14 or 16 or a portion thereof providing increased silicon uptake in a Glycine max plant.
[0458] 62. The plant of paragraphs 1-13; 15-19; or 36 or 61, wherein said plant comprises a molecular marker associated with increases Si uptake capable of being amplified and identified with the following primer sequences: SEQ ID NO. 2, 3, 4, 5, 6, 7, 8, 9, 10, 11 and 27-277.
[0459] 63. The plant of any one of paragraphs 1-13; 15-19; or 36 or 61-62, wherein said plant comprises a marker capable being amplified and identified with the following sequences: SEQ ID NO. 12, 13 and 278-495.
[0460] 64. The plant of any one of paragraphs 61-63, wherein said molecular marker is located within HiSil region genes, as defined by an nucleic acid selected from the group consisting of: A(33673022), G(33673483), C(33681630), T(33682500), G(33683047), and C(33683049) of genes Glyma30000 or 30020.
[0461] 65. An agronomically elite Glycine max plant capable of accumulating Si in leaf tissue at a concentration of at least 1% Si concentration when plants are provided with a supply of Si at a concentration of about 0.8 mM under hydroponic conditions, wherein the Glycine max comprises a genomic region introduced into its genome comprising any one of SEQ ID NO: 14, 16 or 18.
[0462] 66. The plant of paragraph 65, wherein said plant has a leaf Si concentration of at least around one point two (1.2×), one and a half (1.5×), double (2×), or triple (3×) the concentration of a control plant not comprising said genomic region.
[0463] 67. The plant of any one of paragraphs 1-13; 15-19; or 36 or 61-66, wherein, said chromosomal interval or genomic region comprises a nucleic acid encoding a polypeptide with an amino acid sequence comprising SEQ ID NO 15 and further wherein the polypeptide comprises at least one amino acid corresponding to a proline at position 5, a isoleucine at position 295 or a valine at position 439.
[0464] 68. The plant of any one of paragraphs 1-13; 15-19; or 36 or 61-67, wherein, said chromosomal interval or genomic region comprises a nucleic acid encoding a polypeptide with an amino acid sequence comprising SEQ ID NO 17 further, wherein the polypeptide comprises at least one amino acid corresponding to a histidine at position 322 or a glycine at position 431.
[0465] 69. The plant of paragraph 68, wherein the nucleic acid is SEQ ID NO: 16.
[0466] 70. The plant of paragraph 67, wherein the nucleic acid is SEQ ID NO: 14.
[0467] 71. A plant of a soybean variety or lineage having high Si uptake, provided that said variety is not Hikmok sorip.
[0468] 72. The plant of paragraph 71, wherein the soybean variety or lineage comprises in its genome a chromosomal interval comprising SEQ ID NO: 14 or 16 wherein said chromosomal interval is derived from Hikmok sorip.
[0469] 73. Seeds produced by the plant of paragraphs 61-72.
[0470] 74. The plant of paragraphs 1-13; 15-19; or 36 or 61-72, wherein said plant additionally has in it genome a transgene that confers any one of the traits selected from the group consisting of: herbicide resistance or insect resistance.
[0471] 75. A plant having introduced into its genome a nucleic acid sequence encoding a protein having 60%, 70%, 80%, 90%, 95%, or 99% sequence identity to any one of SEQ ID NO: 15 or SEQ ID NO: 17.
[0472] 76. The plant of paragraph 75, wherein the plant is a monocot or dicot.
[0473] 77. The plant of any one of paragraphs 75-76, wherein the plant is selected from the group consisting of soybean, tomato, melon, maize, sugarcane, canola, broccoli, cabbage, cauliflower, pepper, oilseed rape, sugarbeet, celery, squash, spinach, cucumber, watermelon, zucchini, common bean, wheat, barley, sweet corn, sunflower, and rice.
[0474] 78. The plant of any one of paragraphs 75-77, wherein the protein is a functional Si transporter that facilitates Si uptake into the plant.
[0475] 79. The plant of any one of paragraphs 75-78, wherein the nucleic acid sequence comprises any one of SEQ ID NOs: 14 or 16.
[0476] 80. The plant of any one of paragraphs 75-79, wherein the nucleic acid encodes a protein comprising or consisting of SEQ ID NO: 15 or SEQ ID NO: 17.
[0477] 81. The plant of any one of paragraphs 75-80, wherein the nucleic acid is derived from a Glycine sp. plant having high silicon uptake.
[0478] 82. The plant of any one of paragraphs 75-81, wherein the nucleic acid is derived from a black hilum soybean variety (e.g. Hikmok sorip) having high Si uptake.
[0479] 83. The plant of any one of paragraphs75-82, wherein at least two nucleic acid sequences are introduced into its genome, wherein the two nucleic acid sequences encode proteins comprising a polypeptide sequence comprising SEQ ID NO: 15 and SEQ ID NO: 17.
[0480] 84. The plant of any one of paragraphs 75-83, wherein the protein is active in said plant's roots.
[0481] 85. The plant of any one of paragraphs 75-84, wherein the protein confers Si accumulation in any one of the plant leaves, plant stem or plant parts.
[0482] 86. The plant of any one of paragraphs 75-85, wherein introduction of said nucleic acid is accomplished by heterologous or transgenic gene expression.
[0483] 87. The plant of any one of paragraphs 75-86, wherein the nucleic acid introduced into said plant's genome is introduced by a plant expression cassette.
[0484] 88. The plant of paragraph 87, wherein the plant expression cassette comprises a promoter operably linked to said nucleic acid wherein said promoter facilitates expression of the nucleic acid in said plant's root tissue.
[0485] 89. The plant of paragraph 88, wherein the promoter sequence comprises a nucleic acid sequence comprising a nucleic acid having 60%, 65%, 70%, 75%, 80%, 85%, 90%, 95%, 99% sequence identity with SEQ ID NO: 18, 19 or 20.
[0486] 90. The plant of any one of paragraphs 88-89, wherein the promoter is a root specific promoter or a root preferred promoter.
[0487] 91. The plant of paragraph 90, wherein the root specific or root preferred promoter is selected from the group consisting of RCc3, PHT1, MtPT1, MtPT2, Pyk10, Beta-tubulin, LRX1, BTG-26, LeAMT1, LeNRT1-1, KDC1, TobRb7, OsRAB5a, ALF5, and NRT2.
[0488] 92. The plant of any one of paragraphs 75-86, wherein the nucleic acid has been introduced into the plant genome by either CRISPR, TALEN, meganucleases or through modification of genomic nucleic acids,
[0489] 93. The plant of any one of paragraphs 75-92, wherein the nucleic acid encodes a polypeptide with an amino acid sequence comprising SEQ ID NO 15 and further wherein the polypeptide comprises at least one amino acid corresponding to a proline at position 5, a isoleucine at position 295 or a valine at position 439.
[0490] 94. The plant of any one of paragraphs 75-93, wherein the nucleic acid encodes a polypeptide with an amino acid sequence comprising SEQ ID NO 17 further, wherein the polypeptide comprises at least one amino acid corresponding to a histidine at position 322 or a glycine at position 431.
[0491] 95. The plant of any one of paragraphs 75-94, wherein the plant is a high Si accumulator as compared to a control plant not comprising said nucleic acid.
[0492] 96. The plant of any one of paragraphs 75-86, wherein introduction of said nucleic acid is accomplished by plant introgression or plant breeding.
[0493] 97. The plant of paragraph 96, wherein at least one parental line of said plant was selected or identified by a molecular marker associated with said nucleic acid.
[0494] 98. The plant of any one of paragraphs 75-97, wherein the introduction of the nucleic acid confers any one of increased biotic resistance or tolerance, increased abiotic resistance or tolerance, increased yield, increased biomass, quality or a combination thereof.
[0495] 99. The plant of any one of paragraphs 75-98, wherein the introduction of the nucleic acid confers increased resistance to at least one pathogen from the group consisting of: nematode, rust, smut, Golovinomyces cichoracearum, Erysiphe cichoracearum, Blumefia graminis, Podosphaera xanthii, Sphaerotheca fuliginea, Pythium ultimum, Uncinula necator, Mycosphaerella pinodes, Magnaporthe grisea, Bipolaris oryzae, Magnaporthe grisea, Rhizoctonia solani, Phytophthora sojae, Schizaphis graminum, Bemisia tabaci, Rhopaiosiphum maidis, Deroceras reticulatum, Diatraea saccharalis, Schizaphis graminum and Myzus persicae; or a combination thereof.
[0496] 100. The plant of any one of paragraphs 75-99, having increased resistance to a stress selected from the group consisting of: diseases (such as powdery mildew, Pythium ultimum, root rot, leaf spot, blast, brown spot, leaf and neck blast, or sheath blight); insect pests (such as whitefly, aphid, grey field slug, sugarcane borer, green bug, or aphid); abiotic stress (such as drought, flooding, high level of salinity, heavy metal, aluminum, manganese, cadmium, zinc, UV-B, boron or cold tolerance (i.e. extreme temperatures)).
[0497] 101. The plant of any one of paragraphs 75-100, having improved agronomical traits such as seedling vigor, yield potential and phosphate uptake, plant growth, seedling growth, phosphorus uptake, lodging, reproductive growth, or grain quality.
[0498] 102. The plant of any one of paragraphs 75-101, wherein the plant is a crop plant.
[0499] 103. The plant of any one of paragraphs 75-102, wherein said plant is a soybean plant and is not Hikmok sorip (PI372415A).
[0500] 104. The plant of any one of paragraphs 75-103, wherein the plant is an elite soybean plant.
[0501] 105. The plant of any one of paragraphs 75-104, wherein said plant comprises a silicon concentration of at least 1% Si concentration in leaf when plants are provided with a supply of Si at a concentration of about 0.8 mM under hydroponic conditions.
[0502] 106. The plant of any one of paragraphs 75-105, wherein said plant has a leaf Si concentration of at least about double (2×) as compared to a control plant.
[0503] 107. A plant expression cassette comprising an isolated polynucleotide encoding a Si transporter selected from the group consisting of SEQ ID NOs: 14 and 16.
[0504] 108. The expression cassette of paragraph 107, wherein said polynucleotide encodes a polypeptide selected from the group consisting of SEQ ID NOs: 15 or 17.
[0505] 109. The plant expression cassette of any one of paragraphs 107-108, wherein the polynucleotide is operably linked to a non-native promoter.
[0506] 110. The plant expression cassette of anyone of paragraphs 107-109, wherein the DNA has at least one allelic modification to said polynucleotide native template encoding a polypeptide comprising SEQ ID NO: 15 wherein the polynucleotide allelic modification results in any one of the amino acid changes selected from the group consisting of: a proline at position 5, a isoleucine at position 295 or a valine at position 439.
[0507] 111. The plant expression cassette of paragraphs 107-110, wherein the DNA has at least one allelic modification to said polynucleotide native template encoding a polypeptide comprising SEQ ID NO: 17 wherein the polynucleotide allelic modification results in any one of the amino acid changes selected from the group consisting of: a histidine at position 322 or a glycine at position 431.
[0508] 112. The plant expression cassette of any one of paragraphs 110-111, wherein the allelic modification is achieved through CRISPR, TALEN, Meganucleases, or genome editing technologies.
[0509] 113. A vector comprising the plant expression cassette of any one of paragraphs 107-112.

[0510] 1114. A plant expression cassette comprising the polynucleotide of any one of paragraphs 107-112.
[0511] 115. The plant expression cassette of any one of paragraphs 107-112, wherein said polynucleotide is operably-linked to a root-specific or root-preferred promoter.
[0512] 116. The plant expression cassette of paragraph 115, wherein said promoter comprises SEQ ID NO: 18, 19 or 20.
[0513] 117. A transgenic plant comprising the plant expression cassette of paragraphs 114-116.
[0514] 118. A transgenic seed comprising the plant expression cassette of paragraphs 114-116.
[0515] 119. The transgenic plant of paragraph 117, wherein the plant is selected from the group consisting of soybean, tomato, melon, maize, sugarcane, canola, broccoli, cabbage, cauliflower, pepper, oilseed rape, sugarbeet, celery, squash, spinach, cucumber, watermelon, zucchini, common bean, wheat, barley, sweet corn, sunflower, and rice.
[0516] 120. The transgenic seed of paragraph 119, wherein said seed is from a transgenic plant selected from the group consisting of soybean, tomato, melon, maize, sugarcane, canola, broccoli, cabbage, cauliflower, pepper, oilseed rape, sugarbeet, celery, squash, spinach, cucumber, watermelon, zucchini, common bean, wheat, barley, sweet corn, sunflower, and rice.
[0517] 121. A method of producing a plant having increased silicon uptake, said method comprising the steps of:
   [0518] a) introducing into a plant's genome a nucleic acid encoding a HiSil protein;
   [0519] b) selecting for a plant, plant germplasm or plant seed comprising the nucleic acid of a); and
   [0520] c) producing a plant having increased silicon uptake.
[0521] 122. The method of paragraph 121, wherein the nucleic acid sequence encodes a protein sequence having 60%, 65%, 70%, 75%, 80%, 85%, 90%, 95%, 99, or 100% sequence identity to any one of SEQ ID NOs: 15 or 17.
[0522] 123. The method of any one of paragraph 121-122, wherein the plant is a dicot or monocot.
[0523] 124. The method of any one of paragraphs 121-123, wherein the plant is a high Si accumulator as compared to a control plant not comprising said nucleic acid.
[0524] 125. The method of any one of paragraphs 121-124, wherein the plant is soybean, tomato, melon, maize, sugarcane, canola, broccoli, cabbage, cauliflower, pepper, oilseed rape, sugarbeet, celery, squash, spinach, cucumber, watermelon, zucchini, common bean, wheat, barley, sweet corn, sunflower, or rice.
[0525] 126. The method of any one of paragraphs 121-125, wherein the plant has introduced into its genome a nucleic acid sequence comprising a nucleotide sequence having 60%, 65%, 70%, 75%, 80%, 85%, 90%, 95%, 99, or 100% sequence identity to any one of SEQ ID NOs: 14 or 16.
[0526] 127. The method of any one of paragraphs 121-126, wherein the nucleic acid sequence encodes a protein that facilitates Si uptake.
[0527] 128. The method of paragraph 127, wherein the nucleic acid sequence encodes a HiSil protein.
[0528] 129. The method of any one of paragraphs 121-128, wherein the protein is active in root tissue.
[0529] 130. The method of any one of paragraphs 121-129, wherein the protein confers Si accumulation in any one of the plant leaves, plant stem or plant parts.
[0530] 131. The method of any one of paragraphs 121-130, wherein, in addition to the nucleic acid, an operably-linked root-specific or root-preferred promoter has been introduced into said plant genome.
[0531] 132. The method of any one of paragraphs 121-131, wherein, in addition to said nucleic acid, an operably linked HiSil promoter sequence has been introduced into said plant genome.
[0532] 133. The method of paragraph 132, wherein the promoter sequence comprises a nucleic acid sequence comprising a nucleic acid having 60%, 65%, 70%, 75%, 80%, 85%, 90%, 95%, 99% sequence identity with SEQ ID NO: 18, 19 or 20.
[0533] 134. The method of paragraph 131, wherein the root specific or root preferred promoter is selected from the group consisting of: RCc3, PHT1, MtPT1, MtPT2, Pyk10, Beta-tubulin, LRX1, BTG-26, LeAMT1, LeNRT1-1, KDC1, TobRb7, OsRAB5a, ALF5, and NRT2.
[0534] 135. The method of any one of paragraphs 121-130, wherein the nucleic acid has been introduced into the plant genome by either CRISPR, TALEN, meganucleases or through specific modification of genomic nucleic acids.
[0535] 136. The method any one of paragraphs 121-130, wherein introduction of said nucleic acid is accomplished by heterologous or transgenic gene expression.
[0536] 137. The method of any one of paragraphs 121-130, wherein introduction of said nucleic acid is accomplished by plant introgression, plant breeding or marker assisted breeding (MAB).
[0537] 138. A method of producing a disease resistant plant, the method comprising the step of:
   [0538] a) stably introducing into a plant genome the plant expression cassette as described in any one of paragraphs 108-112 and 114-116, wherein said introduction of said plant expression cassette confers increased Si uptake in said plant; thereby producing a disease resistant plant.
[0539] 139. A method of producing a plant with increased yield, the method comprising the step of:
   [0540] a) stably introducing into a plant genome the plant expression cassette as described in any one of paragraphs 114-116, wherein said introduction of said plant expression cassette confers increased Si uptake in said plant; thereby producing a plant with increased yield
[0541] 140. The method of any one of paragraphs 138 and 139, wherein the plant s soybean, tomato, melon, maize, sugarcane, canola, broccoli, cabbage, cauliflower, pepper, oilseed rape, sugarbeet, celery, squash, spinach, cucumber, watermelon, zucchini, common bean, wheat, barley, sweet corn, sunflower, or rice.
[0542] 141. An agronomically elite soybean seed which is the progeny of a transgenic female ancestor soybean plant having in its genome a recombinant DNA which expresses a Si transporter comprising an amino acid sequence with at last about 80%, 90%, 95%, 99% or 100% sequence identity to the amino acid sequence of any one of SEQ ID NOs: 15 or 17.
[0543] 142. A method for producing a soybean plant with increased Si uptake, the steps comprising:
   [0544] a) introducing into a plant cell a recombinant DNA molecule comprising a polynucleotide encoding a polypeptide, wherein the nucleotide sequence of the polynucleotide is selected from the group consisting of:
      [0545] i) a nucleotide sequence set forth as SEQ ID NO: 14 or 16;
      [0546] ii) a nucleotide sequence encoding a protein having the amino acid sequence of SEQ ID NO: 15 or 17;
      [0547] iii) a nucleotide sequence with at least 90%, at least 91%, at least 92%, at least 93%, at least 94%, at least 95%, at least 96%, at least 97%, at least 98%, at least 99% identity to SEQ ID NO: 1 14, or 16; and iv) a nucleotide sequence encoding a protein with at least 90%, at least 91%, at least 92%, at least 93%, at least 94%, at least 95%, at least 96%, at least 97%, at least 98%, at least 99% identity to SEQ ID NO: 15 and 17;
   [0548] and
   [0549] b) growing a plant from said plant cell.
[0550] 143. The method of paragraph 142, further comprising selecting a plant with an enhanced trait selected from: increased yield, increased nitrogen use efficiency, increased disease resistance, increased abiotic stress tolerance, increased insect resistance, and increased water use efficiency or drought tolerance as compared to a control plant.
[0551] 144. A seed for the plant as defined in any one of paragraphs 1-19; 36; 74-106; 119-120 and 141.
[0552] 145. A seed from the plant as defined in any one of paragraphs 1-19; 36; 61-72; 74-106; 119-120 and 141.
[0553] 146. A kit for producing a silicon high accumulating plant comprising:
   [0554] a) the seed of paragraph 144 or 145, and
   [0555] b) at least one constituent for making a silicon soil amendment.
[0556] 147. The kit of paragraph 146, wherein said constituent is selected from the group consisting of: mine slag, wollastonite, steel mills slag, crushed rock, calcium silicate, magnesium silicate, amorphous diatomaceous earth (DE), calcium magnesium silicate, phosphorous furnace byproduct, calcium silicate, potassium silicate, silicic acid, organic silicone, sodium silicate.
[0557] 148. The kit of paragraph 147, wherein said constituent is selected from: Ca₂SiO₄, CaSiO₂, SiO₂, CaSiO₃, MgSiO₃, or K₂SiO₃, (Si(OH)₄, H₄SiO₄, and R₂SiO, wherein R is an organic group such as methyl, ethyl, or phenyl.
[0558] 149. The kit of any one of paragraphs 146-148, further comprising instructions on how to dilute said silicon constituent in water for applications in soil.
[0559] 150. A cell of a seed as defined in paragraph 144 or 145.
[0560] 151. A cell of a plant as defined in any one of paragraphs 1-19; 36; 61-72; 74-106; 119-120 and 141.
[0561] 152. A method for growing a plant, comprising the steps of:
   [0562] a) providing a plant according to any one of paragraph 1-19; 36; 61-72; 74-106; 119-120 and 141 or a seed as defined in paragraph 144 or 145;
   [0563] b) growing a plant therefrom; and
   [0564] c) irrigating said plant with a silicon soil amendment.
[0565] 153. The method of paragraph 152, wherein said silicon soil amendment is selected from the group consisting of: mine slag, wollastonite, steel mills slag, crushed rock, calcium silicate, magnesium silicate, amorphous diatomaceous earth (DE), calcium magnesium silicate, phosphorous furnace byproduct, calcium silicate, potassium silicate, silicic acid, organic silicone, sodium silicate.
[0566] 154. The method of paragraph 153, wherein said silicon soil amendment is selected from: Ca₂SiO₄, SiO₂, CaSiO₃, MgSiO₃, or K₂SiO₃, (Si(OH)₄, H₄SiO₄, and R₂SiO, wherein R is an organic group such as methyl, ethyl, or phenyl.
[0567] 155. A method of introducing a HiSil trait into a soybean plant, comprising:
   [0568] a) selecting a soybean plant comprising a nucleic acid sequence in its genome that encodes a protein having at least 80% sequence identity to SEQ ID NO: 15 or SEQ ID NO:17, wherein the protein comprises a Threonine at a position corresponding to position 295 of SEQ ID NO:15, and
   [0569] b) introducing a modification to the nucleic acid sequence such that the encoded protein comprises an Isoleucine at the position corresponding to position 295 of SEQ ID NO:15,
   [0570] wherein a site-directed nuclease (SDN) introduces the modification to the nucleic acid sequence.
[0571] 156. The method of paragraph 155, wherein the SDN is selected from: meganuclease, zinc finger, Transcription activator-like effector nucleases system (TALEN) or Clustered Regularly Interspaced Short Palindromic Repeats system (CRISPR) system.
[0572] 157. A soybean plant produced by the method of paragraph 155.
[0573] 158. An elite soybean plant comprising a nucleic acid sequence that encodes a protein having at least 80% sequence identity to SEQ ID NO: 15 or SEQ ID NO: 17, wherein the protein comprises an Isoleucine at a position corresponding to position 295 of SEQ ID NO:15.
[0574] 159. A method of growing a soybean crop, the method comprising the steps of:
   [0575] a) planting in a field a soybean plant as described in any one of paragraphs 152 to 154 and
   [0576] b) applying a compound to the field that comprises silicon:
      [0577] i. prior to planting,
      [0578] ii. at planting, or
      [0579] iii. after planting.
[0580] 160. A method of growing a soybean crop, the method comprising:
   [0581] a) selecting a location for planting the soybean crop, wherein the location comprises soil, said soil having a silicon concentration at a level of at least 7 ppm, at least 10 ppm, at least 15 ppm, at least 20 ppm, at least 30 ppm, at least 40 ppm or at least 50 ppm and
   [0582] b) planting and growing a soybean plant as described in any one of paragraphs 152-154.
[0583] 161. The plant of any one of paragraphs 72-106, wherein the plant comprises a H1 haplotype.

### EXAMPLES

[0584] The following examples are put forth so as to provide those of ordinary skill in the art with a complete disclosure and description of how to make and use the present invention, and are not intended to limit the scope of what the inventors regard as their invention nor are they intended to represent that the experiments below are all or the only experiments performed. Efforts have been made to ensure accuracy with respect to numbers used (e.g. amounts, temperature, etc.) but some experimental errors and deviations should be accounted for. Unless indicated otherwise, parts are parts by weight, molecular weight is weight average molecular weight, temperature is in degrees Centigrade, and pressure is at or near atmospheric.

### Example 1

### Discovery of the HiSil Region in Hikmok sorip Soybean

[0585] Materials and methods

### Plant Material

[0586] A set of 139 soybean cultivars representing early maturity groups was evaluated for Si accumulation, Subsequently, a cross was made between the known high absorbing line Hikmok sorip and a typical absorbing line (Majesta) and we developed 141 recombinant inbred lines (RIL) that were also evaluated. Soybean plants, three per line, were grown in a greenhouse under controlled conditions. Surface sterilization of seed was performed using 2% sodium hypochloride treatment for 5 min followed by three subsequent washes with distilled water. Plants were grown in potting soil with or without 1.7 mM Si prepared from potassium silicate (Kasil #6, 23.6% SiO₂, National Silicates).

### Quantification of Silicon in Soybean Leaf Samples

[0587] The first trifoliate leaf of each plant was collected for Si concentration analysis three weeks after the first Si amendment. Dried leaves were ground to a powder in a bead homogenizer (Omni Bead Ruptor, Omni International). Measurements were made with a portable X-ray fluorescence spectrometer (Niton XL3t900 GOLDD XRF analyser; Thermo Scientific) at the University of York, UK, according to the methods of Reidinger et al., (2012). The Si rate assay was carried out with non-inoculated plants.

### X-ray Microanalysis and Scanning Electron Microscopy

[0588] Si distribution in leaves of different soybean genotypes was analyzed by using scanning electron microscopy coupled with an energy dispersive X-ray (DXR) micro-analyzer. A single fully expanded healthy leaf without any symptoms of disease or physical damage was harvested from each plant species grown with or without Si. Small sections (approx. 10×10 mm) were cut from the central region of the leaf, avoiding midribs. The cut pieces of leaves were lyophilized and coated with gold and paladium to provide conductivity. Coated samples were examined using a CAMECA SX-100 Universal EPMA microscope (Cameca instruments Inc., Trumbull, USA). Voltage of 15 kV and a current of 20 nA were used for processing to get the elemental concentration profiles across the leaf sample.

### Genotyping-by-Sequencing of Soybean Cultivars

[0589] SNP genotyping previously performed using a GBS approach was used (Sonah et al. 2014). The ApeK1 restriction enzyme was used for library preparation following Elshire's protocol (Elshire et al,, 2011) with minor modifications described in Sonah et al. (2013). Single-end sequencing of multiplex GBS libraries was performed using the Illumina HiSeq2000 at the Genome Québec Innovation Center, McGill University (Montreal, QC, Canada). Illumine sequence read processing, mapping, SNP calling and genotyping were performed using the IGST-GBS pipeline (Sonah et al., 2013). Vcftools and several in-house scripts were used to obtain good quality SNPs. Imputation of missing data was performed with fastPHASE 1.3 (Scheet & Stephens, 2006). Functional and structural annotation of SNPs was performed using SnpEff (version 3.3H) and the soybean genome annotation provided in the Phytozome database (Goodstein et al., 2012, Cingolani et al., 2012).

### Genome Wide Association Study (GWAS)

[0590] GWAS was performed using software tools like TASSEL 3.0 and the Genomic Association and Prediction Integrated Tool (GAPIT) (Bradbury et al., 2007; Lipka et al,, 2012). A general linear model (GLM) was used with or without the covariate P from principal component analysis (PCA) and the covariate Q obtained from STRUCTURE. A kinship matrix was calculated either using the VanRaden method (K) or the EMMA method (K*) to determine relatedness among individuals (Kang et al., 2008; Loiselle et al., 1995), Compressed mixed linear models (CMLM) incorporating a kinship matrix (K or K*) along with P or Q were tested. The negative log(1/n) was used to establish a significance threshold.

### QTL Mapping

[0591] Genotypic data were obtained using GBS for the 141 RILs derived from the Majesta×Hikmok sorip cross and used for QTL mapping. QTL mapping was performed using the QTL IciMapping software (version 3.3, released July 2013, www.isbreeding.net).

### Grafting Experiments

[0592] Grafts were made among four cultivars Jack, Majesta, Williams 82 and Hikmok sorip. To promote branching, a shoot meristem was plucked at the V1 stage. Of two arising branches, one branch was grafted very close to the branching point. Leaf samples were taken from both branches to compare Si accumulation. Plants of the same genotype were grafted with each other and used as controls.

### Results

### Evaluation of Silicon (Si) Uptake in Soybean Germplasm

[0593] The cultivated soybean germplasm set was evaluated under greenhouse conditions to measure Si uptake ability. Values ranged between 0.65% and 1.53% with an average of ca. 1.0% and a standard deviation of 0.15 (FIG. 1). The frequency distribution indicated a limited variability for this trait.

Evaluation of Silicon (Si) Iptake in Majesta×Himok sorip RILs

[0594] Since Hikmok sorip appeared to be a line with exceptional ability to absorb Si based on our own observations, it was crossed with Majesta, a cultivated line showing average Si accumulation, to create 141 RILs in an attempt to map the genetic loci that could govern Si accumulation. X-ray microscopy of leaf tissues corroborated the higher accumulation of Si in Hikmok sorip compared to Majesta (FIG. 3),

[0595] The Si accumulation in leaf tissues of all 141 RILs derived from crosses between Majesta and Hikmok sorip showed a range of nearly 2.0% between the lowest and highest values. The average value was 1.69% with a standard deviation of 0.45. Unlike the data with the Canadian germplasm lines, frequency distribution showed a bimodal distribution pattern suggesting the involvement of specific genes in the Si uptake regulation (FIG. 2).

### Genome-Wide Association Study (GWAS) for Si Accumulation in Soybean

[0596] GWAS was initially performed using a set of 139 cultivated lines. Based on this analysis, none of the markers showed a significant association with Si accumulation in soybean leaves (FIG. 4). Subsequently, the 95 PI (Plant introduction) lines were combined with the Canadian lines for an additional GWAS. Once again, none of the markers showed a significant association with Si accumulation in spite of the seemingly wider range of phenotypes in the PI lines.

Identification of a Quantitative Trait Locus (QTL) for Si Accumulation in Hikmok sorip

[0597] A linkage map of 768 SNP markers was used for QTL mapping of Si accumulation using the 141 RIIs from Majesta×Hikmok sorip. A single large effect QTL (named thereafter Hisil locus) was observed on chromosome 16 with a LOD score of 39.33 (FIG. 5), This QTL alone explained over 66% of the phenotypic variation (Table 11). This Hisil locus was found to be located at ca. 95 cM on the genetic map of chromosome 16 (FIGS. 6 & 7) No significant epistatic interactions were detected using EPlstatic QTL mapping as performed by ICIMapping (FIG. 8),

TABLE 11
Details of quantitative trait loci (QTL) identified for silicon accumulation
in soybean leaf using different software tool

| | Mapping | | | Left | Right | | | Add. |
|---|---|---|---|---|---|---|---|---|
| Software | method | Chr. | Position | Marker | Marker | LOD | PVE (%) | effect |
| ICIMapping | ICIM | 16 | 95.2 | SNP606 | SNP607 | 39.33 | 66.62 | −0.37 |
| | IM | 16 | 95.2 | SNP606 | SNP607 | 38.29 | 70.91 | −0.38 |
| | | 16 | 97.0 | SNP609 | SNP610 | 35.79 | 70.54 | −0.38 |

ICIM—Inclusive composite interval mapping;
IM—Interval mapping;
Chr.—Chromosome;
PVE—phenotypic variance explained;
Add. effect—Additive effect.

### Grafting Experiments

[0598] To further characterize the Si uptake trait, different cultivars were grafted onto a Hikmok sorip rootstock and vice versa and evaluated for Si absorption. Results showed that Si accumulation in a given graft was determined by the rootstock and not the aerial portion of the plant. In addition, grafts with Hikmok sorip as rootstock absorbed as much Si as Hikmok sorip hence confirming the unique trait of Hikmok sorip to absorb higher quantities of Si (Table 12).

TABLE 12
Silicon (Si) uptake observed in leaves of different soybean
cultivar grafted on Hikmok sorip rootstock and vice versa

| | | Average | Standard |
|---|---|---|---|
| Scion | Rootstock | Si (%) | Deviation |
| Majesta | Hikmok sorip | 2.81 | 0.29 |
| Jack | Hikmok sorip | 2.85 | 0.54 |
| Williams 82 | Hikmok sorip | 2.85 | 0.06 |
| Hikmok sorip | Majesta | 1.32 | 0.23 |
| Hikmok sorip | Jack | 1.36 | 0.10 |
| Hikmok sorip | Williams 82 | 1.39 | 0.42 |
| Majesta | Majesta | 1.23 | 0.12 |
| Jack | Jack | 1.31 | 0.18 |
| Williams 82 | Williams 82 | 1.16 | 0.34 |
| Hikmok sorip | Hikmok sorip | 2.93 | 0.26 |

### Discussion

[0599] In this work, we discovered a specific genomic region, thereafter named Kish', in a specific soybean cultivar known as Hikmok sorip that confers the ability to accumulate higher quantities of silicon (Si). Si is known to provide plants with many benefits, mostly in the prevention of biotic and abiotic stresses, when it is sufficiently available or amended in a growth substrate.

[0600] The protective role of silicon against stresses will be greatly influenced by the ability of the plant species under treatment to absorb the element. For this reason, some plant species will not respond to a Si treatment and results will often be interpreted as a failure by Si to confer protection, rather than a biological limitation. As a general rule, all monocots are Si accumulators. For dicots, the picture is not as clear as most dicots are unable to accumulate Si, For instance, the model plant Arabidopsis will only accumulate limited amounts. Notable exceptions among dicots are the Cucurbitaceae that are well known to benefit from Si feeding. Other exceptions include some species within the legumes such as pigeon pea and soybean (Hodson et al., 2005).

[0601] At the intraspecific level, limited variation in Si absorption ability has been reported or observed. For that purpose, monocots and more specifically rice have been studied and variations between the tested cultivars never exceeded 30%. It was therefore quite unexpected to observe variation as high as 200% between Hikmok sorip and other soybean cultivars tested (Arsenault-Labrecque et al., 2012: Guérin et al., 2014).

[0602] To determine how common high silicon uptake is within soybean germplasm, we tested 139 cultivated soybean varieties. Our results showed that there was very little variation among the germplasm tested, most of the lines averaging around 1% Si. Expectedly, the GENAS analysis failed to identify associated SNP markers given the limited variation. These observations suggest that soybean germplasm is limited in its variation for Si absorption, a characteristic that appears to be shared by most if not all species in the plant kingdom.

[0603] Within our collection of RILs based on Majesta X Hikmok sorip, we observed a much wider variation of Si accumulation compared to the original set of 139 cultivated lines. As a matter of fact, two distinct peaks emerged suggesting that very few loci controlled this trait. This was confirmed by our QTL analysis that revealed that almost all the phenotypic variation could be explained by a single locus on chromosome 16. Our results further indicated the absence of epistatic interaction for this trait.

[0604] From a breeding point of view, this discovery brings a new and unique opportunity to create soybean lines with improved Si uptake and thus a greater resistance to biotic and abiotic stresses. Considering that Si-associated benefits are wide reaching, soybean lines carrying this trait could display multiple and durable resistance to the numerous constraints affecting soybean production.

### Example 2

### Markers Development

### Materials and Methods for Marker Development

[0605] Whole genome re-sequencing data of Hikmok sorip aligned with Williams 82 was used to predict Hisil-Del a large deletion of about 286 bp, Flanking primers to target Hisil-Del was designed using Primer3 software tool (bioinfo.utee/primer3-0.4.0/). Similarly, primers for the other deletions and insertion were designed using Primer3 software tool. PCR amplification of these primers was performed using DNA from Hikmok sorip, Williams, and recombinant inbred lines (RILs) were developed from the cross between Hikmok sorip and Magesta. PCR amplicons were resolved by agarose gel electrophoresis.

### Results

[0606] A set of five markers in the HiSil region was developed for the discriminant detection of HiSil gene in a segregating population. The marker HiSil-Del was designed based on a large deletion (-286 bp, Gm16:33,712,274 to 33,712,559) present in the cul ivar Hikmok sorip when compared to Williams 82 reference genome (G. max V1.1, FIG. 9) The HiSil-Del is tightly linked to HiSil since it is separated by a distance of only 28 Kb. Because of the large size difference in PCR amplicons, the marker HiSil-Del can be used to screen the presence of HiSil even using agarose gel electrophoresis (FIG. 10).

[0607] In addition, four gene-specific markers, including three deletions and one insertion in Hikmok sorip compared to Williams 82 reference genome, were developed (Table 13). These markers are helpful to follow the HiSil gene in segregating progenies and can be used to identify the gene in any new sources of germplasm.

TABLE 13
Details of markers linked to HiSil gene

| | | | Product | |
|---|---|---|---|---|
| | | | Size (bp) | |
| SEQ ID. | | | William | Hikmok |
| No. | Primer_ID | Primer Sequence | 82 | Sorip |
| 2 | HiSil-del1_F | GAATTTTAAGTCAACAGACATGCAC | 227 | 192 |
| 3 | HiSil-del1_R | TTTCACGGTAAAAATTATCACCAAC | | |
| 4 | HiSil-del2_F | GCAGGGAGGCAACAAATTAACAAAC | 328 | 0 |
| 5 | HiSil-del2_R | TGTTTCACAATCTTTCTTCTCACACAC | | |
| 6 | HiSil-del3b_F | GGAGGATCGCGACCATCATACTTTC | 398 | 278 |
| 7 | HiSil-del3b_R | TTCCACACCCTCACACATGATTGTA | | |
| 8 | HiSil-ins1_F | TGTCGCGTTAAATTCGTATGTTTG | 159 | 181 |
| 9 | HiSil-ins1_R | TCAAATTAAAGGCATGAGGATTTTGG | | |
| 10 | HiSil-Del_F | CCCACATCATTTTGACTTAACACTAG | 734 | 448 |
| 11 | HiSil-Del_R | TCTTCTTAGTTCTTAGATTCTCGCAC | | |

[0608] We have also designed a Cleaved Amplified Polymorphic Sequences (CAPS) marker linked to the HiSil gene. Conveniently, the Mboll restriction enzyme cleaves the PCR product into two fragments in the Hisil of Hikmok sorip variety and three fragments in the wild-type gene of the Williams variety (Table 14, FIG. 11),

TABLE 14
Details of Cleaved Amplified Polymorphic Sequences
(CAPS) markers linked to HiSil gene

| | | | Products after | |
|---|---|---|---|---|
| | | | cleavage | |
| SEQ ID | | | Williams | Hikmok |
| No. | Primer ID | Sequence | 82 | Sorip |
| 12 | HiSil- | CCTTTTATGTCTCTTCCGTTTGAAAAGC | 3 (73 bp, | 2 (73 bp, |
| | Mboll_F | | 169 bp, | 464 bp) |
| 13 | HiSil- | AAGTATGATGGTCGCGATCCTCCTCC | 295 bp) | |
| | Mboll_R | | | |

### Example 3

### Confirmation of QTL with High Density Genetic Map of Majesta×Hikmok sorip

[0609] Based on the QTL idenitifed in the linkage group J between the flanking markers of SNP605 and SNP610, the targeted region was further saturated with 94 new SNP markers. Genetic mapping was done by JoinMap (version 3.0) using regression mapping with the Kosambi's mapping function. A high density genetic map of 132 cM was constructed for the linkage group J.

[0610] All the 155 marker data (61 earlier mapped and 94 newly genotyped markers) of linkage group J was analyzed to find out the significance of association with the leaf Si content phenotype.

[0611] QTL mapping was performored in in-house workflow, where interval mapping, multiple interval mapping and composite interval mapping algorithms are integrated. The LR test statistics significance threshold of 13.8145 (LOD=2.0) was used to declare QTL.

[0612] The QTL mapping using the high density genetic map also detected a single major QTL in the same interval in the linkage group J which was detected in low density map.

### New HiSII Interval

[0613] Marker analysis indicates that within the Hikmok×Majesta population, a chromosomal interval spanning from about SNP595 (31.13Mb) to SNP615 (36.55 Mb) (FIGS. 12 and 13) is highly associated with the HiSil trait.

[0614] A total of 155 markers were identified within this chromosomal interval to have a P value of less than or equal to 0.05 indicating that markers within this interval may be used to produce and/or select for lines having the HiSil Trait.

### Example 4

### QTL Mapping Performed in an Alternatve Mapping Population of Hamilton×PI 89772

[0615] As a PI 89772 has the same haplotype of Hikmok in the HiSil gene region, an alternate F2:3 mapping population of Hamilton×PI 89772 was used to confirm the HiSil QTL identified in Majesta×Hikmok

### Methods

### Phenotyping of Hamilton×PI 89772 Mapping Population

[0616] A mapping population derived from a cross Hamilton×PI 89772 was used for the QTL mapping. A total of 100 F3 (F2:3) lines were evaluated for Si uptake in the greenhouse at University Laval. Soybean plants, five per line, were grown in a greenhouse under controlled conditions. Plants were grown in potting soil with adequate supply of Si (1.7 mM) prepared from potassium silicate (Kasil #6, 23.6% SiO2, National Silicates), The first trifoliate leaf of each plant (5×100) was collected, dried and crushed to a fine powder. Leaf Si content was estimated by using a Niton XL3t Ultra Analyzer XRF according to the method described by Reidinger et al. (2012).

[0617] Genotyping, map construction and QTL mapping with Hamilton×PI89772 mapping population

[0618] Progeny of mapping population Hamilton x PI 89772 F2:3 were genotyped by 2990 genome wide markers. After removing the monomorphic markers, 1149 markers were used for genetic mapping. Genetic mapping was done by JoinMap (version 3.0) using regression mapping with the Kosambi's mapping function. A high density genetic map of 178 cM was constructed.The marker order between genetic and physical mapping is highly conserved.

[0619] QTL mapping was done in in-house workflow, where interval mapping, multiple interval mapping and composite interval mapping algorithms are integrated. The QTL are indentifed with a LR test statistics significance threshold of 13.8145 (LOD=2.0).

### Results

### Segregation of Leaf Silicon Content in Hamilton×PI 89772 Mapping Population

[0620] The F3 lines grown for three weeks with Si supplementation showed an average of 1.30% Si with a maximum of 2.03% and a minimum 0.71% Si. A typical 1:2:1 segregation was observed suggesting a single locus regulation of Si absorption (FIG. 14).

### Genetic Map and QTL for Leaf Silicon Content

[0621] Based on the two mapping populations high-density genetic linkage map and the individual marker association with the leaf Si content pheonotype the defined interval for HiSil gene region is between the markers SY0089B to IGGY260. This interval in genetic map of Majesta X Hikmok sorip is between 92.6 cM to 132 cM, and corresponds to the physical map position of 31.15 Mb to 36.72 Mb (5.57 Mb fragment)) in chromosome 16 (FIGS. 13, 15, 16 & 17). The markers within this interval in both mapping populations have highly significant p-values for silicon uptake.

[0622] There are 135 markers developed in this interval, some of which are described in Table 15 below. More markers and favorable HiSil allel calls, targeted sequence, primer sequences and SNPs are presented in Tables 16-20.

TABLE 15
Markers p-values for each population

| | Physical | Hikmok × Majesta | Hamilton × PI89772 |
|---|---|---|---|
| Marker | Position | p-value | p-value |
| IGGY2746 | 12198849 | | 0.47973 |
| IGGY2752 | 12975991 | | 0.00622 |
| SNP574 | 14100150 | 0.00346 | |
| IGGY2757 | 14550460 | | 0.55375 |
| SNP575 | 14557684 | 0.00674 | |
| IGGY492 | 15662425 | | 0.13595 |
| IGGY566 | 16552349 | | 0.51714 |
| SNP576 | 17115818 | 0.00573 | |
| IGGY2760 | 17335057 | | 0.01356 |
| IGGY2765 | 18941830 | | 0.01866 |
| SNP577 | 19047353 | 0.00787 | |
| SNP578 | 19361529 | 0.00591 | |

TABLE 16
Markers for Majesta X Hikmok sorip

| Table 16. | | | | | | | Candidate | HiSil |
|---|---|---|---|---|---|---|---|---|
| Marker | Physical | | Sum of | Mean | | Significance level (0.1 = *, 0.05 = **, | Gene | interval |
| Name | Position | DF | Squares | Square | Prob > F | 0.01 = *** and respectively) | region | region |
| SNP555 | 68523 | 1 | 0.151353 | 0.15135 | 0.328348454 | | | |
| SNP556 | 185022 | 1 | 0.080349 | 0.08035 | 0.534313513 | | | |
| SNP557 | 1327055 | 1 | 0.555785 | 0.55579 | 0.065154167 | * | | |
| SNP558 | 2403360 | 1 | 0.494472 | 0.49447 | 0.078001122 | * | | |
| SNP559 | 2746738 | 1 | 0.335189 | 0.33519 | 0.141672748 | | | |
| SNP560 | 2767293 | 1 | 0.281512 | 0.28151 | 0.175995487 | | | |
| SNP561 | 2912151 | 1 | 0.32543 | 0.32543 | 0.147209825 | | | |
| SNP562 | 3038182 | 1 | 0.507504 | 0.5075 | 0.075809502 | * | | |
| SNP563 | 3047968 | 1 | 0.366235 | 0.36624 | 0.125732429 | | | |
| SNP564 | 3946949 | 1 | 0.086747 | 0.08675 | 0.506399746 | | | |
| SNP565 | 4256100 | 1 | 0.134143 | 0.13414 | 0.36258166 | | | |
| SNP566 | 4937234 | 1 | 0.003755 | 0.00375 | 2.966347664 | | | |
| SNP567 | 5703382 | 1 | 0.666382 | 0.66638 | 0.04558601 | ** | | |
| SNP568 | 6196089 | 1 | 0.817139 | 0.81714 | 0.028321054 | ** | | |
| SNP569 | 7138469 | 1 | 0.642251 | 0.64225 | 0.048512289 | ** | | |
| SNP570 | 7391200 | 1 | 0.85974 | 0.85974 | 0.024582701 | ** | | |
| SNP571 | 8023117 | 1 | 1.139265 | 1.13927 | 0.010683357 | ** | | |
| SNP572 | 8713046 | 1 | 1.204528 | 1.20453 | 0.00882985 | *** | | |
| SNP573 | 11563819 | 1 | 1.491718 | 1.49172 | 0.00385849 | **** | | |
| SNP574 | 14100150 | 1 | 1.529828 | 1.52983 | 0.003460473 | **** | | |
| SNP575 | 14557684 | 1 | 1.297166 | 1.29717 | 0.006748991 | *** | | |
| SNP576 | 17115818 | 1 | 1.353506 | 1.35351 | 0.005736309 | *** | | |
| SNP577 | 19047353 | 1 | 1.243958 | 1.24396 | 0.007873597 | *** | | |
| SNP578 | 19361529 | 1 | 1.342919 | 1.34292 | 0.005913919 | *** | | |
| SNP579 | 21610613 | 1 | 1.342919 | 1.34292 | 0.005913919 | *** | | |
| SNP580 | 21614498 | 1 | 1.466068 | 1.46607 | 0.004152226 | **** | | |
| SNP581 | 24007766 | 1 | 1.305901 | 1.3059 | 0.006580507 | *** | | |
| SNP582 | 24196632 | 1 | 1.088614 | 1.08861 | 0.012397597 | ** | | |
| SNP583 | 25768284 | 1 | 0.769365 | 0.76937 | 0.032458681 | ** | | |
| SNP584 | 26760058 | 1 | 0.652906 | 0.65291 | 0.046875849 | ** | | |
| SNP585 | 28073122 | 1 | 1.154882 | 1.15488 | 0.01020619 | ** | | |
| SNP586 | 29895735 | 1 | 2.514687 | 2.51469 | 0.000213473 | ****** | | |
| SNP587 | 30374483 | 1 | 4.462075 | 4.46208 | 7.83333E−07 | *********** | | |
| SNP588 | 30374503 | 1 | 4.462075 | 4.46208 | 7.83333E−07 | *********** | | |
| SNP589 | 30395866 | 1 | 4.996338 | 4.99634 | 1.59109E−07 | ************ | | |
| SNP590 | 30402864 | 1 | 4.462075 | 4.46208 | 7.83333E−07 | *********** | | |
| SNP591 | 30402865 | 1 | 4.668914 | 4.66891 | 4.24076E−07 | ************ | | |
| SNP592 | 30442126 | 1 | 4.462075 | 4.46208 | 7.83333E−07 | *********** | | |
| SNP593 | 30505518 | 1 | 4.739114 | 4.73911 | 3.44012E−07 | ************ | | |
| SNP594 | 30805487 | 1 | 7.256661 | 7.25666 | 1.29248E−10 | ****************** | | |
| SNP595 | 31136175 | 1 | 7.457938 | 7.45794 | 6.63242E−11 | ******************* | | HiSil |
| SNP596 | 31178190 | 1 | 8.378529 | 8.37853 | 2.89427E−12 | ********************** | | inteval |
| SNP597 | 31178205 | 1 | 8.378529 | 8.37853 | 2.89427E−12 | ********************** | | Region |
| SNP598 | 31472093 | 1 | 8.18326 | 8.18326 | 5.68859E−12 | ********************* | | |
| SNP599 | 31565242 | 1 | 9.030765 | 9.03076 | 2.88883E−13 | ************************ | | |
| SNP600 | 31840074 | 1 | 10.47006 | 10.47006 | 1.34716E−15 | **************************** | | |
| SY4353 | 31848568 | 2 | 8.055602 | 4.0278 | 1.61744E−10 | ****************** | | |
| SY3108 | 31860682 | 2 | 9.065398 | 4.5327 | 5.09474E−12 | ********************* | | |
| SY3110 | 31863327 | 2 | 8.373514 | 4.18676 | 5.07125E−11 | ******************* | | |
| SY0871AQ | 31869001 | 2 | 8.858589 | 4.42929 | 7.23307E−12 | ********************* | | |
| SY4329 | 31898811 | 2 | 7.854068 | 3.92703 | 3.15757E−10 | ****************** | | |
| SY3005 | 31996339 | 2 | 9.81321 | 4.9066 | 3.48357E−13 | ************************ | | |
| SNP601 | 32026703 | 1 | 9.915038 | 9.91504 | 1.12118E−14 | ************************** | | |
| SY4316 | 32039454 | 2 | 10.35878 | 5.17939 | 4.58243E−14 | ************************** | | |
| SNP602 | 32076322 | 1 | 11.96807 | 11.96807 | 3.13004E−18 | ********************************** | | |
| SY4324 | 32083583 | 2 | 10.10366 | 5.05183 | 1.24227E−13 | ************************ | | |
| SY3112 | 32084966 | 2 | 11.35494 | 5.67747 | 9.53431E−16 | ***************************** | | |
| SY0096C | 32100624 | 2 | 11.40449 | 5.70224 | 9.76298E−16 | ***************************** | | |
| SY0096A | 32101062 | 2 | 10.95473 | 5.47736 | 2.62075E−15 | **************************** | | |
| SY4225 | 32283031 | 2 | 11.10175 | 5.55088 | 2.12492E−15 | **************************** | | |
| SNP603 | 32329390 | 1 | 12.43003 | 12.43003 | 4.30751E−19 | ************************************ | | |
| SY4219 | 32343705 | 2 | 11.51485 | 5.75742 | 2.20571E−16 | ****************************** | | |
| SY3114 | 32474449 | 2 | 11.24478 | 5.62239 | 1.47978E−15 | **************************** | | |
| SY4231 | 32494752 | 2 | 12.29487 | 6.14743 | 3.11925E−17 | ******************************** | | |
| SY4326 | 32507776 | 2 | 11.42993 | 5.71496 | 7.05647E−16 | ***************************** | | |
| SY4232 | 32533983 | 2 | 10.80177 | 5.40088 | 8.42102E−15 | *************************** | | |
| SNP604 | 32547296 | 1 | 12.15319 | 12.15319 | 1.42361E−18 | ********************************** | | |
| SY4224 | 32843154 | 2 | 12.42758 | 6.21379 | 3.4057E−18 | ********************************** | | |
| SY0567AQ | 32881385 | 2 | 12.12912 | 6.06456 | 3.94449E−17 | ******************************** | | |
| SY0098BQ | 32881404 | 2 | 10.35748 | 5.17874 | 4.60527E−14 | ************************** | | |
| SY0127AQ | 32890833 | 2 | 9.815027 | 4.80751 | 3.2444E−15 | **************************** | | |
| SY4335 | 32906255 | 2 | 12.31108 | 6.15554 | 1.84737E−17 | ******************************** | | |
| SY4213 | 32946342 | 2 | 11.95973 | 5.97986 | 8.08869E−17 | ******************************* | | |
| SY4227 | 33021575 | 2 | 12.25133 | 6.12566 | 2.38034E−17 | ******************************** | | |
| SNP605 | 33104446 | 1 | 13.4811 | 13.4811 | 3.7692E−21 | **************************************** | | |
| SY4426 | 33104446 | 2 | 11.55566 | 5.77783 | 4.24728E−18 | ****************************** | | |
| SY4330 | 33204904 | 2 | 11.78663 | 5.89332 | 1.6544E−16 | ****************************** | | |
| SY3121 | 33263666 | 2 | 12.56897 | 6.28448 | 6.11656E−18 | ********************************* | | |
| SY4336 | 33463159 | 2 | 13.94979 | 8.97489 | 1.90832E−20 | ************************************** | | |
| SY0099E | 33474867 | 2 | 13.97061 | 6.9853 | 1.30428E−20 | ************************************** | | |
| SNP606 | 33527064 | 1 | 19.5685 | 19.5685 | 3.67287E−37 | ***************************************** | | |
| | | | | | | ****************** | | |
| SY4435 | 33540839 | 2 | 15.92787 | 7.96394 | 7.04519E−25 | ****************************************** | | |
| | | | | | | ***** | | |
| SY4325 | 33562531 | 2 | 16.12569 | 8.06285 | 1.5349E−25 | ******************************************** | | |
| | | | | | | **** | | |
| SNP607 | 33595090 | 1 | 19.40175 | 19.40175 | 1.39109E−36 | ********************************************** | | |
| | | | | | | ************* | | |
| SY4421 | 33595090 | 2 | 14.77934 | 7.38967 | 2.01678E−22 | ****************************************** | | |
| SY4439 | 33611752 | 2 | 15.89571 | 7.94785 | 1.09623E−24 | ********************************************** | | |
| SY4432 | 33636446 | 2 | 16.14538 | 8.07269 | 4.07334E−26 | ********************************************** | | |
| | | | | | | **** | | |
| SY4217 | 33654456 | 2 | 16.26075 | 8.13037 | 4.5184E−26 | ********************************************* | | |
| | | | | | | ***** | | |
| SY4310 | 33655743 | 2 | 16.92317 | 8.46158 | 1.46227E−27 | ******************************************** | | |
| | | | | | | ******** | | |
| SY4250 | 33655875 | 2 | 15.8712 | 7.9356 | 6.34085E−25 | ********************************************* | | |
| | | | | | | ** | | |
| SY4290 | 33655946 | 2 | 15.51561 | 7.75781 | 4.37898E−24 | ********************************************** | | |
| SY4297 | 33657467 | 2 | 15.33372 | 7.66686 | 6.69048E−24 | ********************************************* | | |
| SY4278 | 33658314 | 2 | 16.48768 | 8.24384 | 1.60274E−26 | ******************************************** | | |
| | | | | | | ****** | | |
| SY4284 | 33660305 | 2 | 15.888 | 7.944 | 5.77951E−25 | ******************************************** | | |
| | | | | | | *** | | |
| SY4261 | 33661778 | 2 | 16.6182 | 8.3091 | 1.73392E−26 | ******************************************* | | |
| | | | | | | ******* | | |
| SY4302 | 33662550 | 2 | 15.80226 | 7.90113 | 9.26426E−25 | ***************************************** | | |
| | | | | | | ****** | | |
| SY4252 | 33667338 | 2 | 15.37192 | 7.68596 | 9.41153E−24 | ********************************************* | | |
| SY4307 | 33667499 | 2 | 15.75358 | 7.87679 | 1.59139E−24 | ********************************************** | | |
| SY4255 | 33667587 | 2 | 16.60542 | 8.30271 | 7.72718E−27 | ******************************************* | | |
| | | | | | | ******* | | |
| SY4253 | 33667829 | 2 | 16.24036 | 8.12018 | 6.17405E−26 | ******************************************* | | |
| | | | | | | ***** | | |
| SY4247 | 33667974 | 2 | 15.49338 | 7.74669 | 6.2044E−24 | ******************************************** | HiSil | |
| SY4300 | 33668038 | 2 | 15.72529 | 7.86284 | 1.4109E−24 | ********************************************* | Candidate | |
| SY4305 | 33668118 | 2 | 16.84613 | 8.42306 | 2.32598E−27 | ********************************************* | Gene | |
| | | | | | | ****** | Region | |
| SY4257 | 33668227 | 2 | 15.37199 | 7.686 | 1.81392E−23 | ******************************************* | | |
| SY4289 | 33668347 | 2 | 15.51937 | 7.75969 | 8.90505E−24 | ******************************************** | | |
| SY4285 | 33668427 | 2 | 15.45654 | 7.72827 | 6.0043E−24 | ******************************************** | | |
| SY4276 | 33668501 | 2 | 14.45145 | 7.22572 | 1.65539E−23 | ******************************************* | | |
| SY4279 | 33668652 | 2 | 15.71191 | 7.85596 | 1.3399E−24 | ********************************************* | | |
| SY4246 | 33668680 | 2 | 13.70768 | 6.85384 | 1.52018E−20 | ************************************** | | |
| SY4306 | 33669577 | 2 | 15.45654 | 7.72827 | 6.0043E−24 | ********************************************* | | |
| SY4292 | 33669600 | 2 | 17.15298 | 8.57649 | 3.59046E−28 | ********************************************* | | |
| | | | | | | ********* | | |
| SY4314 | 33669639 | 2 | 15.97883 | 7.98941 | 5.84916E−25 | ******************************************* | | |
| | | | | | | **** | | |
| SY4299 | 33670119 | 2 | 15.4045 | 7.70225 | 1.64609E−23 | ******************************************** | | |
| SY4251 | 33670154 | 2 | 17.13755 | 8.56877 | 4.2901E−28 | ******************************************** | | |
| | | | | | | ********** | | |
| SY4301 | 33670204 | 2 | 15.86657 | 7.93329 | 6.50489E−25 | ****************************************** | | |
| | | | | | | ***** | | |
| SY4291 | 33670373 | 2 | 15.58439 | 7.78219 | 5.47082E−24 | ********************************************* | | |
| SY4207 | 33673022 | 2 | 17.3205 | 8.66025 | 1.26548E−28 | ********************************************* | | |
| | | | | | | ********* | | |
| SY4265 | 33673244 | 2 | 15.57149 | 7.78575 | 1.37076E−24 | ********************************************** | | |
| SY4282 | 33673483 | 2 | 16.52542 | 8.26271 | 1.36216E−26 | ******************************************* | | |
| | | | | | | ******* | | |
| SY4244 | 33673647 | 2 | 15.36955 | 7.68478 | 9.5304E−24 | ********************************************* | | |
| SY4264 | 33674572 | 2 | 15.23575 | 7.61788 | 1.64061E−23 | ******************************************** | | |
| SY4249 | 33676079 | 2 | 16.1861 | 8.09305 | 1.09114E−25 | ******************************************** | | |
| | | | | | | **** | | |
| SY4303 | 33676250 | 2 | 15.1569 | 7.57845 | 2.90934E−23 | ******************************************** | | |
| SY4295 | 33676255 | 2 | 15.55092 | 7.77546 | 3.6237E−24 | ********************************************** | | |
| SY4273 | 33676984 | 2 | 15.96304 | 7.98152 | 1.09951E−25 | ******************************************** | | |
| | | | | | | | **** | |
| SY4268 | 33678035 | 2 | 15.74199 | 7.871 | 1.28807E−24 | ********************************************** | | |
| SY4269 | 33679379 | 2 | 16.42154 | 8.21077 | 2.83679E−28 | ****************************************** | | |
| | | | | | | ******** | | |
| SY4254 | 33679893 | 2 | 15.39591 | 7.69795 | 6.74759E−24 | ********************************************* | | |
| SY4256 | 33680025 | 2 | 14.65863 | 7.32931 | 4.3023E−24 | ********************************************** | | |
| SY4272 | 33680071 | 2 | 14.98325 | 7.49163 | 7.13818E−23 | ******************************************* | | |
| SY4281 | 33680257 | 2 | 15.01452 | 7.50726 | 6.0786E−23 | ******************************************* | | |
| SY4416 | 33681630 | 2 | 15.76635 | 7.88317 | 1.12768E−24 | ********************************************** | | |
| SY4360 | 33681946 | 2 | 14.68797 | 7.34398 | 2.17132E−22 | ****************************************** | | |
| SY4210 | 33681961 | 2 | 16.7465 | 8.37325 | 7.07291E−27 | ******************************************** | | |
| | | | | | | ****** | | |
| SY4208 | 33682500 | 2 | t 17.717 | 8.8585 | 1.48266E−29 | ********************************************** | | |
| | | | | | | ********* | | |
| SY4362 | 33712274 | 2 | 15.34542 | 7.67271 | 1.08275E−23 | ******************************************** | | |
| SY4215 | 33728789 | 2 | 14.38978 | 7.19489 | 1.96837E−21 | **************************************** | | |
| SNP608 | 33802005 | 1 | 17.66351 | 17.66351 | 3.74686E−31 | ********************************************* | | |
| | | | | | | ************* | | |
| SY4418 | 33803957 | 2 | 14.92391 | 7.46196 | 7.68774E−23 | ******************************************* | | |
| SY0569AQ | 33853271 | 2 | 14.75802 | 7.37901 | 2.24609E−22 | ****************************************** | | |
| SY4322 | 34838750 | 2 | 12.17477 | 6.08738 | 6.14401E−18 | ********************************* | | |
| SY4433 | 35206878 | 2 | 14.23067 | 7.11533 | 4.3051E−21 | **************************************** | | |
| SY1044BQ | 35208490 | 2 | 15.45473 | 7.72736 | 7.74188E−24 | ********************************************* | | |
| SNP609 | 35218844 | 1 | 17.73376 | 17.73376 | 2.35896E−31 | ******************************************* | | |
| | | | | | | **************** | | |
| SY4437 | 35218844 | 2 | 13.03976 | 6.51988 | 2.97408E−22 | ****************************************** | | |
| SNP610 | 35762786 | 1 | 15.02618 | 15.02618 | 1.83896E−24 | ********************************************** | | |
| SY4440 | 35882270 | 2 | 11.31705 | 5.65852 | 6.35362E−16 | ***************************** | | |
| SY4434 | 35916594 | 2 | 12.12608 | 6.06304 | 6.27991E−17 | ******************************* | | |
| SNP611 | 36257345 | 1 | 13.14691 | 13.14691 | 1.76279E−20 | ************************************** | | |
| SNP612 | 36411870 | 1 | 12.26185 | 12.26185 | 8.92683E−19 | *********************************** | | |
| SNP613 | 36452436 | 1 | 12.01993 | 12.01993 | 2.51239E−18 | ********************************** | | |
| SNP614 | 36484326 | 1 | 11.09312 | 11.09312 | 1.1504E−16 | ****************************** | | |
| SNP615 | 36550306 | 1 | 10.59843 | 10.59843 | 8.176E−16 | ***************************** | | |
| SY0573AQ | 36641894 | 2 | 10.32794 | 5.16397 | 5.14808E−14 | ************************* | | |
| SY0574AQ | 36727283 | 2 | 10.4628 | 5.2314 | 2.68188E−14 | ************************** | | |

TABLE 17
Markers for Hamilton × PI89772

| | | | | | | | Significance level | | |
|---|---|---|---|---|---|---|---|---|---|
| Table 17. | | | | | | | (0.1 = *, 0.05 = **, | | HiSil |
| Marker | Physical | | Sum of | Mean | | | 0.01 = *** | Candidate | interval |
| Name | Position | DF | Squares | Square | F Ratio | Prob > F | and respectively) | Gene region | region |
| IGGY157 | 133098 | 2 | 0.3085745 | 0.154287 | 1.725 | 0.176974 | | | |
| IGGY644 | 133288 | 2 | 0.1061116 | 0.053056 | 0.5645 | 0.563217 | | | |
| IGGY339 | 724481 | 2 | 0.0504603 | 0.02523 | 0.2678 | 0.759802 | | | |
| IGGY117 | 1348464 | 2 | 0.2491671 | 0.124584 | 1.2867 | 0.27305 | | | |
| IGGY332 | 1629988 | 2 | 0.2312231 | 0.115612 | 1.2086 | 0.29448 | | | |
| IGGY1773 | 1630675 | 2 | 0.1759643 | 0.087982 | 0.8895 | 0.405797 | | | |
| IGGY554 | 2746738 | 2 | 0.2478873 | 0.123944 | 1.2785 | 0.275779 | | | |
| IGGY477 | 3534754 | 2 | 0.09811 | 0.049055 | 0.5017 | 0.599938 | | | |
| IGGY1567 | 4008875 | 2 | 0.4077588 | 0.203879 | 2.3314 | 0.097987 | * | | |
| IGGY525 | 6868110 | 2 | 0.2614395 | 0.13072 | 1.4192 | 0.239824 | | | |
| IGGY2746 | 12198849 | 2 | 0.1429733 | 0.071487 | 0.7242 | 0.479739 | | | |
| IGGY2752 | 12975991 | 2 | 0.8242433 | 0.412122 | 5.2996 | 0.006229 | *** | | |
| IGGY2757 | 14550460 | 2 | 0.1124239 | 0.056212 | 0.5808 | 0.553751 | | | |
| IGGY492 | 15662425 | 2 | 0.4060111 | 0.203006 | 1.9949 | 0.135954 | | | |
| IGGY566 | 16552349 | 2 | 0.1319188 | 0.065959 | 0.6493 | 0.517144 | | | |
| IGGY2760 | 17335057 | 2 | 0.6699558 | 0.334978 | 4.4385 | 0.013569 | ** | | |
| IGGY2765 | 18941830 | 2 | 0.7464825 | 0.373241 | 4.067 | 0.018667 | ** | | |
| IGGY2786 | 24608838 | 2 | 0.4515498 | 0.225775 | 2.521 | 0.081525 | * | | |
| IGGY2716 | 25066103 | 2 | 0.6415773 | 0.320789 | 3.8391 | 0.023459 | ** | | |
| IGGY2717 | 26011238 | 2 | 0.3131059 | 0.156553 | 1.8796 | 0.152179 | | | |
| IGGY2718 | 26124486 | 2 | 0.3879167 | 0.193958 | 2.238 | 0.107292 | | | |
| IGGY2721 | 26481028 | 2 | 0.5348341 | 0.267417 | 3.3401 | 0.037668 | ** | | |
| IGGY2722 | 26762918 | 2 | 0.2423423 | 0.121171 | 1.2499 | 0.283176 | | | |
| IGGY2348 | 26779932 | 2 | 0.4729054 | 0.236453 | 2.4891 | 0.084045 | * | | |
| IGGY1569 | 28389568 | 2 | 0.9841681 | 0.492084 | 5.9696 | 0.003356 | **** | | |
| IGGY1570 | 28657055 | 2 | 0.9434522 | 0.471726 | 5.1904 | 0.006584 | *** | | |
| IGGY2363 | 28657775 | 2 | 0.8292107 | 0.414605 | 4.3654 | 0.01435 | ** | | |
| IGGY2364 | 28710930 | 2 | 0.8233316 | 0.411666 | 4.5491 | 0.01186 | ** | | |
| IGGY1572 | 28999468 | 2 | 0.8057474 | 0.402874 | 4.4027 | 0.013638 | ** | | |
| IGGY929 | 29088944 | 2 | 0.9982975 | 0.499149 | 5.4964 | 0.004977 | **** | | |
| IGGY2367 | 29144193 | 2 | 1.3135219 | 0.656761 | 8.0003 | 0.00056 | ***** | | |
| IGGY580 | 29156455 | 2 | 0.8926534 | 0.446327 | 4.9791 | 0.007938 | *** | | |
| IGGY2370 | 30046974 | 2 | 1.579365 | 0.789683 | 9.4542 | 0.000158 | ****** | | |
| IGGY978 | 30151465 | 2 | 1.7116603 | 0.85583 | 10.6525 | 5.84E−05 | ******* | | |
| IGGY2371 | 30153571 | 2 | 1.8795405 | 0.93977 | 12.2797 | 1.64E−05 | ******** | | |
| IGGY2299 | 30331442 | 2 | 1.9166595 | 0.95833 | 13.4211 | 6.63E−06 | ********* | | |
| SY0089B | 31154742 | 2 | 3.4084689 | 1.704234 | 27.5372 | 2.54E−10 | ****************** | | HiSil |
| IGGY741 | 31154850 | 2 | 3.6426032 | 1.821302 | 34.2201 | 2.6E−11 | ******************** | | interval |
| SY3148 | 31192049 | 2 | 3.1322073 | 1.566104 | 25.6986 | 1.16E−09 | **************** | | Region |
| SY3889 | 31256347 | 2 | 3.6420165 | 1.821008 | 30.5667 | 3.98E−11 | ******************** | | |
| IGGY57 | 31860682 | 2 | 4.2726445 | 2.13622 | 39.9664 | 6.72E−13 | *********************** | | |
| SY4354 | 31868259 | 2 | 4.2958423 | 2.147921 | 44.6002 | 2.53E−14 | ************************** | | |
| SY4349 | 31947660 | 2 | 2.6174747 | 1.308737 | 23.0138 | 1.04E−08 | ************** | | |
| SY4343 | 31949260 | 2 | 3.430466 | 1.715233 | 34.4594 | 8.02E−12 | ********************* | | |
| SY4235 | 31952066 | 2 | 4.2484638 | 2.124232 | 43.6753 | 2.58E−14 | ************************** | | |
| SY4358 | 31991011 | 2 | 4.2423151 | 2.121158 | 43.8212 | 3.74E−14 | ************************** | | |
| IGGY2353 | 31996339 | 2 | 3.8734648 | 1.936732 | 33.7048 | 8.18E−12 | ********************* | | |
| SY4316 | 32039454 | 2 | 4.1426309 | 2.071315 | 41.4655 | 1.06E−13 | *********************** | | |
| SY4324 | 32083583 | 2 | 4.231746 | 2.115873 | 43.0226 | 6.76E−14 | ************************* | | |
| IGGY1779 | 32101062 | 2 | 4.5868262 | 2.293413 | 45.7381 | 9.76E−15 | *************************** | | |
| SY4234 | 32145135 | 2 | 3.6929261 | 1.846463 | 33.1526 | 1.2E−11 | ******************** | | |
| SY4225 | 32283031 | 2 | 4.176961 | 2.08848 | 39.9752 | 2E−13 | ************************ | | |
| SY4219 | 32343705 | 2 | 3.7183526 | 1.859176 | 36.3998 | 2.57E−12 | ********************** | | |
| SY3114 | 32474449 | 2 | 4.5250074 | 2.262504 | 45.0267 | 1.07E−14 | ************************** | | |
| SY4231 | 32494752 | 2 | 4.2118733 | 2.105937 | 42.8333 | 5.18E−14 | ************************* | | |
| SY4232 | 32533983 | 2 | 3.8811344 | 1.940567 | 36.8992 | 1.09E−12 | ********************** | | |
| SY4224 | 32843154 | 2 | 4.1041938 | 2.052097 | 36.63 | 1.27E−12 | ********************** | | |
| IGGY2850 | 32848989 | 2 | 5.0099213 | 2.504961 | 68.1297 | 2.35E−17 | ******************************** | | |
| SY0567AQ | 32881385 | 2 | 4.5848802 | 2.29244 | 49.0939 | 1.84E−15 | **************************** | | |
| IGGY1772 | 32881404 | 2 | 4.8616354 | 2.430818 | 53.6366 | 1.23E−15 | **************************** | | |
| IGGY2226 | 32890833 | 2 | 4.711218 | 2.355609 | 50.6433 | 1.89E−15 | **************************** | | |
| SY4335 | 32906255 | 2 | 4.4657107 | 2.232855 | 49.7423 | 1.65E−15 | **************************** | | |
| SY4213 | 32946342 | 2 | 4.8280627 | 2.414031 | 53.2842 | 3.12E−16 | ****************************** | | |
| SY4227 | 33021575 | 2 | 4.657339 | 2.32867 | 49.8694 | 1.56E−15 | **************************** | | |
| SY4426 | 33104446 | 2 | 4.2506796 | 2.12534 | 53.3329 | 5.36E−15 | *************************** | | |
| SY3121 | 33263666 | 2 | 5.0111924 | 2.505596 | 55.66 | 4.13E−17 | ******************************** | | |
| IGGY2357 | 33324609 | 2 | 4.1184615 | 2.059231 | 39.3923 | 1.09E−12 | ********************** | | |
| SY4217 | 33654456 | 2 | 5.0867587 | 2.543379 | 63.534 | 2.97E−18 | *********************************** | | |
| SY4310 | 33655743 | 2 | 4.743259 | 2.37163 | 49.9829 | 1.07E−15 | **************************** | | |
| SY4250 | 33655875 | 2 | 4.9775747 | 2.488787 | 56.4107 | 3.64E−17 | ******************************** | | |
| SY4290 | 33655946 | 2 | 5.0825746 | 2.541287 | 62.8785 | 4.52E−18 | ********************************** | | |
| SY4297 | 33657467 | 2 | 5.0766191 | 2.53831 | 64.202 | 1.69E−18 | ********************************** | | |
| SY4278 | 33658314 | 2 | 5.3053377 | 2.652669 | 63.7125 | 2.08E−18 | ********************************** | | |
| SY4284 | 33660305 | 2 | 5.2867145 | 2.643357 | 61.1883 | 4.74E−18 | ********************************** | | |
| SY4261 | 33661778 | 2 | 5.2009548 | 2.600477 | 57.6881 | 1.8E−17 | ******************************** | | |
| SY4302 | 33662550 | 2 | 5.1267078 | 2.563354 | 61.8146 | 8.17E−18 | ********************************* | | |
| SY4252 | 33667338 | 2 | 5.0867587 | 2.543379 | 63.534 | 2.97E−18 | ********************************** | | |
| SY4307 | 33667499 | 2 | 5.0766191 | 2.53831 | 64.202 | 1.69E−18 | ********************************** | | |
| SY4255 | 33667587 | 2 | 4.8229725 | 2.411486 | 59.0616 | 2.65E−17 | ******************************** | | |
| SY4253 | 33667829 | 2 | 5.2311489 | 2.615574 | 62.9171 | 2.23E−18 | ********************************** | | |
| SY4247 | 33667974 | 2 | 4.4476177 | 2.223809 | 43.7947 | 2.22E−14 | ************************** | | |
| SY4300 | 33668038 | 2 | 5.2978241 | 2.648912 | 63.8267 | 1.72E−18 | ********************************** | | |
| SY4305 | 33668118 | 2 | 4.9573634 | 2.478682 | 54.2705 | 1.56E−16 | ****************************** | | |
| SY4257 | 33668227 | 2 | 5.2785828 | 2.639291 | 62.9034 | 1.51E−18 | ********************************** | | |
| SY4289 | 33668347 | 2 | 5.2717257 | 2.635863 | 64.4284 | 1.16E−18 | ********************************** | | |
| SY4285 | 33668427 | 2 | 5.0766191 | 2.53831 | 64.202 | 1.69E−18 | ********************************** | | |
| SY4276 | 33668501 | 2 | 5.0766191 | 2.53831 | 64.4348 | 1.53E−18 | ********************************** | | |
| SY4279 | 33668652 | 2 | 5.3047481 | 2.652374 | 64.2155 | 1.46E−18 | ********************************** | | |
| SY4246 | 33668680 | 2 | 5.1829674 | 2.591484 | 63.8842 | 2.23E−18 | ********************************** | | |
| SY4306 | 33669577 | 2 | 4.9813009 | 2.49065 | 59.055 | 1.79E−17 | ******************************** | | |
| SY4292 | 33669600 | 2 | 5.0115917 | 2.505796 | 59.1339 | 2.25E−17 | ******************************** | | |
| SY4314 | 33669639 | 2 | 4.9248768 | 2.462438 | 61.1088 | 1.46E−17 | ******************************** | | |
| SY4299 | 33670119 | 2 | 5.0766191 | 2.53831 | 64.202 | 1.69E−18 | ********************************** | | |
| SY4251 | 33670154 | 2 | 5.6130402 | 2.80652 | 94.8063 | 3.41E−20 | ************************************** | | |
| SY4301 | 33670204 | 2 | 4.7926543 | 2.396327 | 50.1686 | 6.55E−16 | ***************************** | | |
| SY4291 | 33670373 | 2 | 5.2971332 | 2.648567 | 65.139 | 7.45E−19 | ************************************ | Hisil [symbol] | |
| SY4207 | 33673022 | 2 | 4.2776157 | 2.138808 | 47.418 | 7.73E−15 | *************************** | | |
| SY4265 | 33673244 | 2 | 4.9212188 | 2.460609 | 59.8477 | 1.65E−17 | ******************************** | | |
| SY4282 | 33673483 | 2 | 5.0801246 | 2.540062 | 63.7063 | 2.4E−18 | ********************************** | | |
| SY4244 | 33673647 | 2 | 5.2144496 | 2.607225 | 63.9812 | 1.23E−18 | ********************************** | | |
| SY4264 | 33674572 | 2 | 5.1110591 | 2.55553 | 58.8881 | 1.93E−17 | ******************************** | | |
| SY4249 | 33676079 | 2 | 5.0867587 | 2.543379 | 63.534 | 2.97E−18 | ********************************** | | |
| SY4303 | 33676250 | 2 | 5.0867587 | 2.543379 | 63.534 | 2.97E−18 | ********************************** | | |
| SY4295 | 33676255 | 2 | 5.0766191 | 2.53831 | 64.202 | 1.69E−18 | ********************************** | | |
| SY4273 | 33676984 | 2 | 5.1071056 | 2.553553 | 63.7484 | 3.14E−18 | ********************************** | | |
| SY4268 | 33678035 | 2 | 5.1116546 | 2.555827 | 61.0581 | 7.46E−18 | ********************************* | | |
| SY4254 | 33679893 | 2 | 4.9562902 | 2.478145 | 60.5918 | 8E−18 | ********************************* | | |
| SY4256 | 33680025 | 2 | 4.7499567 | 2.374978 | 56.7318 | 5.07E−17 | ******************************* | | |
| SY4272 | 33680071 | 2 | 4.9529027 | 2.476451 | 59.8101 | 1.47E−17 | ******************************** | | |
| SY4281 | 33680257 | 2 | 5.2339935 | 2.616997 | 66.6603 | 5.2E−19 | *********************************** | | |
| SY4416 | 33681630 | 2 | 5.4962862 | 2.748143 | 68.7155 | 2.23E−19 | ************************************ | | |
| SY4360 | 33681946 | 2 | 5.1188003 | 2.5594 | 59.4551 | 1.16E−17 | ******************************** | | |
| SY4210 | 33681961 | 2 | 4.9433089 | 2.471654 | 59.9274 | 9.42E−18 | ********************************* | | |
| SY4215 | 33728789 | 2 | 4.9857988 | 2.492899 | 57.7078 | 2.55E−17 | ******************************** | | |
| IGGY515 | 33761413 | 2 | 5.1538024 | 2.576901 | 69.1883 | 4.98E−17 | ******************************** | | |
| IGGY3103 | 33802827 | 2 | 4.7895537 | 2.394777 | 54.0046 | 3.64E−16 | ****************************** | | |
| SY4322 | 34838750 | 2 | 4.7289297 | 2.364465 | 51.4523 | 1.03E−15 | **************************** | | |
| SY4344 | 34838853 | 1 | 3.115028 | 3.115028 | 55.0023 | 2.71E−11 | ******************** | | |
| IGGY2851 | 35127959 | 2 | 5.0307791 | 2.51539 | 54.7949 | 1.23E−16 | ****************************** | | |
| IGGY3104 | 35146338 | 2 | 4.5279721 | 2.263986 | 44.3425 | 6.43E−14 | ************************* | | |
| IGGY476 | 35175117 | 2 | 4.9288214 | 2.464411 | 52.9945 | 4.51E−16 | ****************************** | | |
| SY0571AQ | 35571465 | 2 | 4.8540672 | 2.427034 | 52.8678 | 2.16E−16 | ****************************** | | |
| SY4220 | 35912570 | 2 | 3.666125 | 1.833062 | 34.6852 | 4.99E−12 | ********************** | | |
| IGGY3105 | 36138575 | 2 | 3.9769631 | 1.988482 | 35.6459 | 1.53E−11 | ******************** | | |
| IGGY3106 | 36503493 | 2 | 3.7888135 | 1.894407 | 33.0735 | 1.25E−11 | ******************** | | |
| IGGY282 | 36641894 | 2 | 3.3242547 | 1.662127 | 25.9414 | 6.63E−10 | ***************** | | |
| IGGY260 | 36727283 | 2 | 3.4786383 | 1.739319 | 27.0017 | 4.26E−10 | ****************** | | |
| IGGY683 | 37181573 | 2 | 2.5699486 | 1.284974 | 17.5557 | 3.91E−07 | ************ | | |
| IGGY403 | 37288898 | 2 | 2.5848003 | 1.2924 | 17.3837 | 4.96E−07 | ************ | | |

[symbol]

indicates data missing or illegible when filed

TABLE 18
Favourable Alleles

| Table 18. | PanDa Variant | | Physical | Favorable | Unfavourable |
|---|---|---|---|---|---|
| Marker Name | UId | Marker targeting the DNA polymorphism | Position* | Allele | Allele |
| SY0089B | 12917729 | IGGY1884, IIY26902, IIY26903, IIY526, KY2360A, | 31154742 | A/A | C/C |
| | | SY0089B, SY0089BQ | | | |
| IGGY741 | 12917727 | IGGY741, IIY26809, IIY26810, IIY27145, KY0845A, | 31154850 | T/T | A/A |
| | | SY0089A, SY0089AQ | | | |
| SY3148 | 12980667 | IGGY2378, IIY22259, SY3148 | 31192049 | A/A | G/G |
| SY3889 | 12981395 | IIY31526, SY3889 | 31256347 | A/A | G/G |
| SY4353 | 56017303 | SY4353 | 31848568 | A/A | G/G |
| SY3108 | 12979617 | IGGY57, IIY21912, SY3108 | 31860682 | T/T | A/A |
| SY3110 | 12979670 | IGGY59, IIY21906, SY3110 | 31863327 | A/A | G/G |
| SY4354 | 56017304 | SY4354 | 31868259 | T/T | A/A |
| SY0871AQ | 12981920 | IGGY574, IIY26933, IIY26934, KY2834A, SY0871AQ | 31869001 | T/T | A/A |
| SY4329 | 56017305 | SY4329 | 31898811 | C/C | A/A |
| SY4349 | 56017307 | SY4349 | 31947660 | G/G | A/A |
| SY4343 | 56021709 | SY4343 | 31949260 | T/T | A/A |
| SY4235 | 12981079 | IIY6295, SY4235 | 31952066 | A/A | G/G |
| SY4358 | 56017308 | SY4358 | 31991011 | A/A | C/C |
| SY3005 | 12980686 | IGGY2353, IIY22234, SY3005 | 31996339 | A/A | C/C |
| SY4316 | 56021714 | SY4316 | 32039454 | G/G | A/A |
| SY4324 | 56017310 | SY4324 | 32083583 | G/G | A/A |
| SY3112 | 12979655 | IGGY64, IIY21913, SY3112 | 32084966 | C/C | A/A |
| SY0096C | 12976596 | IIY27048, IIY27049, IIY32229, IIY685, SY0096C, SY0096CQ | 32100624 | T/T | A/A |
| SY0096A | 12976600 | IGGY1779, IIY31492, IIY684, KY0853A, SY0096A, SY0096AQ | 32101062 | G/G | A/A |
| SY4234 | 56017312 | SY4234 | 32145135 | G/G | A/A |
| SY4225 | 56021721 | SY4225 | 32283031 | G/G | C/C |
| SY4219 | 56021724 | SY4219 | 32343705 | G/G | A/A |
| SY3114 | 12979695 | IGGY76, IIY31725, SY3114 | 32474449 | A/A | T/T |
| SY4231 | 56017315 | SY4231 | 32494752 | G/G | A/A |
| SY4326 | 56021730 | SY4326 | 32507776 | A/A | G/G |
| SY4232 | 56021731 | SY4232 | 32533983 | G/G | A/A |
| SY4224 | 56017318 | SY4224 | 32843154 | A/A | C/C |
| IGGY2850 | 12940106 | IGGY2850, IIY31258 | 32848989 | C/C | G/G |
| SY0567AQ | 12933268 | IIY26982, IIY26983, IIY31233, KY2763A, SY0567AQ | 32881385 | T/T | A/A |
| SY0098BQ | 12933267 | IGGY1772, IIY27070, IIY27071, IIY32273, IIY634, SY0098B, | 32881404 | G/G | A/A |
| | | SY0098BQ | | | |
| SY0127AQ | 12948965 | IGGY2226, IIY14700, SY0127A, SY0127AQ | 32890833 | G/G | A/A |
| SY4335 | 56017319 | SY4335 | 32906255 | T/T | A/A |
| SY4213 | 56017321 | SY4213 | 32946342 | T/T | A/A |
| SY4227 | 56017322 | SY4227 | 33021575 | A/A | G/G |
| SY4426 | 353462473 | SY4426, SNP605 | 33104446 | T/T | A/A |
| SY4330 | 56021742 | SY4330 | 33204904 | A/A | G/G |
| SY3121 | 12980630 | IGGY2354, IIY22235, SY3121 | 33263666 | C/C | A/A |
| IGGY2357 | 12980624 | IGGY2357, IIY26917, IIY26918, IIY27306, SY3126 | 33324609 | C/C | G/G |
| SY4336 | 12940400 | SY4336 | 33463159 | C/C | A/A |
| SY0099E | 23543290 | IGGY2310, IIY22189, SY0099E, SY0099EQ | 33474867 | G/G | A/A |
| SY4427 | 412802301 | SY4427, SNP606 | 33527064 | A/A | T/T |
| SY4435 | 12940422 | SY4435 | 33540839 | G/G | A/A |
| SY4325 | 56021749 | SY4325 | 33562531 | A/A | T/T |
| SY4421 | 412802302 | SY4421, SNP607 | 33595090 | A/A | C/C |
| SY4439 | 12940448 | SY4439 | 33611752 | G/G | A/A |
| SY4432 | 12940376 | SY4432 | 33636446 | A/A | G/G |
| SY4217 | 56021750 | SY4217 | 33654456 | A/A | G/G |
| SY4310 | 271724460 | SY4310 | 33655743 | G/G | A/A |
| SY4250 | 271344625 | SY4250 | 33655875 | A/A | G/G |
| SY4290 | 271914417 | SY4290 | 33655946 | A/A | G/G |
| SY4297 | 271534944 | SY4297 | 33657467 | A/A | G/G |
| SY4278 | 270585230 | SY4278 | 33658314 | G/G | A/A |
| SY4284 | 270964571 | SY4284 | 33660305 | A/A | G/G |
| SY4261 | 270964573 | SY4261 | 33661778 | G/G | A/A |
| SY4302 | 270775294 | SY4302 | 33662550 | A/A | G/G |
| SY4252 | 271914434 | SY4252 | 33667338 | G/G | A/A |
| SY4307 | 271344641 | SY4307 | 33667499 | G/G | A/A |
| SY4255 | 270585250 | SY4255 | 33667587 | A/A | T/T |
| SY4253 | 270775313 | SY4253 | 33667829 | C/C | G/G |
| SY4247 | 270775314 | SY4247 | 33667974 | T/T | A/A |
| SY4300 | 270585251 | SY4300 | 33668038 | G/G | A/A |
| SY4305 | 270964584 | SY4305 | 33668118 | G/G | A/A |
| SY4257 | 270775316 | SY4257 | 33668227 | D/D | I/I |
| SY4289 | 271154434 | SY4289 | 33668347 | I/I | D/D |
| SY4285 | 271154435 | SY4285 | 33668427 | G/G | A/A |
| SY4276 | 270964586 | SY4276 | 33668501 | I/I | D/D |
| SY4279 | 271534965 | SY4279 | 33668652 | G/G | A/A |
| SY4246 | 271914435 | SY4246 | 33668680 | A/A | G/G |
| SY4306 | 271154438 | SY4306 | 33669577 | G/G | A/A |
| SY4292 | 271724476 | SY4292 | 33669600 | A/A | G/G |
| SY4314 | 271914437 | SY4314 | 33669639 | C/C | A/A |
| SY4299 | 270964590 | SY4299 | 33670119 | D/D | I/I |
| SY4251 | 271534967 | SY4251 | 33670154 | G/G | A/A |
| SY4301 | 270585256 | SY4301 | 33670204 | A/A | G/G |
| SY4291 | 270964591 | SY4291 | 33670373 | C/C | G/G |
| SY4207 | 266863993 | SY4207 | 33673022 | T/T | A/A |
| SY4265 | 271344646 | SY4265 | 33673244 | A/A | C/C |
| SY4282 | 271154440 | SY4282 | 33673483 | G/G | A/A |
| SY4244 | 270585257 | SY4244 | 33673647 | A/A | C/C |
| SY4264 | 271914440 | SY4264 | 33674572 | D/D | I/I |
| SY4249 | 271534977 | SY4249 | 33676079 | A/A | T/T |
| SY4303 | 270964599 | SY4303 | 33676250 | A/A | G/G |
| SY4295 | 270585267 | SY4295 | 33676255 | A/A | G/G |
| SY4273 | 270964601 | SY4273 | 33676984 | A/A | G/G |
| SY4268 | 271154450 | SY4268 | 33678035 | A/A | G/G |
| SY4269 | 271154453 | SY4269 | 33679379 | A/A | G/G |
| SY4254 | 270585272 | SY4254 | 33679893 | D/D | I/I |
| SY4256 | 270964605 | SY4256 | 33680025 | T/T | A/A |
| SY4272 | 271154454 | SY4272 | 33680071 | C/C | A/A |
| SY4281 | 270775330 | SY4281 | 33680257 | G/G | C/C |
| SY4416 | 272389082 | SY4416 | 33681630 | G/G | A/A |
| SY4360 | 266863987 | SY4206, SY4360 | 33681946 | T/T | A/A |
| SY4210 | 266863990 | SY4210 | 33681961 | A/A | G/G |
| SY4208 | 266863989 | SY4208 | 33682500 | A/A | G/G |
| SY4362 | 999991351 | SY4362 | 33712274 | D/D | I/I |
| SY4215 | 56021751 | SY4215 | 33728789 | A/A | T/T |
| IGGY515 | 12977667 | IGGY515, IIY570, KY0859A, SY0570AQ | 33761413 | G/G | A/A |
| IGGY3103 | 12981397 | IGGY3103, IIY16547, SY3897 | 33802827 | G/G | A/A |
| SY4418 | 12940610 | SY4418 | 33803957 | C/C | A/A |
| SY0569AQ | 12976666 | IGGY343, IIY27050, IIY27051, IIY31493, KY2903A, SY0569AQ | 33853271 | A/A | G/G |
| SY4322 | 56021755 | SY4322 | 34838750 | A/A | G/G |
| SY4344 | 56021756 | SY4344 | 34838853 | A/A | G/G |
| IGGY2851 | 12940655 | IGGY2851, IIY27138 | 35127959 | A/A | G/G |
| IGGY3104 | 12940605 | IGGY3104, IIY27171, SY3898 | 35146338 | C/C | G/G |
| IGGY476 | 12977396 | IGGY476, IIY31353, KY4251A, SY0568AQ | 35175117 | G/G | C/C |
| SY4433 | 12981180 | IIY6383, SY4433 | 35206878 | G/G | C/C |
| SY1044BQ | 12973395 | IGGY768, IIY15423, IIY31340, KY4709A, SY1044AQ, SY1044BQ | 35208490 | A/A | G/G |
| SY4437 | 412802304 | SY4437, SNP609 | 35218844 | A/A | G/G |
| SY0571AQ | 12976368 | IGGY308, IIY32155, IIY97, KY2617A, SY0571AQ | 35571465 | G/G | A/A |
| SY4428 | 412802305 | SY4428, SNP610 | 35762786 | A/A | G/G |
| SY4440 | 12940854 | SY4440 | 35882270 | G/G | C/C |
| SY4220 | 56017329 | SY4220 | 35912570 | G/G | A/A |
| SY4434 | 12981186 | IIY6407, SY4434 | 35916594 | A/A | G/G |
| IGGY3105 | 12981327 | IGGY3105, IIY27172, SY3899 | 36138575 | A/A | G/G |
| IGGY3106 | 12981417 | IGGY3106, IIY27133, SY3900 | 36503493 | G/G | A/A |
| SY0573AQ | 12916916 | IGGY282, IIY249, IIY32182, KY2435A, SY0573AQ | 36641894 | A/A | G/G |
| SY0574AQ | 23543129 | IGGY260, IIY27281, KY2274A, SY0574AQ | 36727283 | G/G | A/A |

TABLE 19
Primers and probes for markers

| | | | | | | |
|---|---|---|---|---|---|---|
| Table 19 | PanDa - Variant | | | Assay component | | |
| Marker Name | UID | Assay id | Type | name | DNA sequence | SEQ ID NO. |

| | | | | | | |
|---|---|---|---|---|---|---|
| IGGY260 | 1065762 | IGGY260 | Illumina Golden Gate | | | |
| IGGY260 | 1065762 | IGGY260 | Illumina Golden Gate | IGGY260F3 | TCAAACGACACCGTCTCAT | 27 |
| IGGY260 | 1065762 | IGGY260 | Iillumina Golden Gate | IGGY260F1 | ACTTCGTCAGTAACGGACGCAAGTTCGAGGGCCAGAGCCTT | 28 |
| IGGY260 | 1065762 | IGGY260 | Illumina Golden Gate | IGGY260F2 | GAGTCGAGGTCATATCGTGCAAGTTCGAGGGCCAGAGCCTC | 29 |
| SY0574AQ | 1078374 | SY0574AQ | Taqman | | | |
| SY0574AQ | 1078374 | SY0574AQ | Taqman | SY0574AF1 | GCGAGGAGGTCGTAGATGAGA | 30 |
| SY0574AQ | 1078374 | SY0574AQ | Taqman | SY0574AR1 | TGAAGGGTAGTTCCGACAAAGAAAC | 31 |
| SY0574AQ | 1078374 | SY0574AQ | Taqman | SY0574AA1FM | TGTCGTTTGACAAGGC | 278 |
| SY0574AQ | 1078374 | SY0574AQ | Taqman | SY0574AA2TT | TCGTTTGACGAGGCT | 279 |
| SY0573AQ | 12916916 | SY0573AQ | Taqman | | | |
| SY0573AQ | 12916916 | SY0573AQ | Taqman | SY0573AF1 | AGTCAACTGCCCAACTTAACCTA | 32 |
| SY0573AQ | 12916916 | SY0573AQ | Taqman | SY0573AR1 | TGCAGTTCTATTCTGGCTATCTTGT | 33 |
| SY0573AQ | 12916916 | SY0573AQ | Taqman | SY0573AA1FM | ACCACTTGTCTGGCC | 280 |
| SY0573AQ | 12916916 | SY0573AQ | Taqman | SY0573AA2TT | CACCACTTGTTTGGC | 281 |
| IGGY741 | 12917727 | IGGY741 | Illumina Golden Gate | | | |
| IGGY741 | 12917727 | IGGY741 | Illumina Golden Gate | IGGY741F3 | AAGGTTCTTTCAAGAAAAGGAA | 34 |
| IGGY741 | 12917727 | IGGY741 | Illumina Golden Gate | IGGY741F1 | ACTTCGTCAGTAACGGACTTTGTGCTTTGATCCTCTGCAGATA | 35 |
| IGGY741 | 12917727 | IGGY741 | Illumina Golden Gate | IGGY741F2 | GAGTCGAGGTCATATCGTTTTGTGCTTTGATCCTCTGCAGATT | 36 |
| SY0089B | 12917729 | SY0089B | Taqman | | | |
| SY0089B | 12917729 | SY0089B | Taqman | SY0089BF1 | TCGAAGCACTTTCCTTTGTATTTCCT | 37 |
| SY0089B | 12917729 | SY0089B | Taqman | SY0089BR1 | CACTTAGGTCACCAACAAGTCGA | 38 |
| SY0089B | 12917729 | SY0089B | Taqman | SY0089BA1FM | CTTCCAATATATAAAAAAAA | 282 |
| SY0089B | 12917729 | SY0089B | Taqman | SY0089BA2VC | TTCCAATATATCAAAAAAA | 283 |
| SY0098BQ | 12933267 | SY0098BQ | Taqman | | | |
| SY0098BQ | 12933267 | SY0098BQ | Taqman | SY0098BF1 | AGTCGATGCAAGAAGAAAGTCTCAAA | 39 |
| SY0098BQ | 12933267 | SY0098BQ | Taqman | SY0098BR1 | CTTTTACTTTCATGTCAGCATGTCTTGT | 40 |
| SY0098BQ | 12933267 | SY0098BQ | Taqman | SY0098BA1FM | CCCTTGCCCTTTAC | 284 |
| SY0098BQ | 12933267 | SY0098BQ | Taqman | SY0098BA2TT | TTACCCTTGCTCTTTAC | 285 |
| SY0567AQ | 12933268 | SY0567AQ | Taqman | | | |
| SY0567AQ | 12933268 | SY0567AQ | Taqman | SY0567AF1 | GTCGATGCAAGAAGAAAGTCTCAA | 41 |
| SY0567AQ | 12933268 | SY0567AQ | Taqman | SY0567AR1 | GTCAGCATGTCTTGTAAAGAAAGGA | 42 |
| SY0567AQ | 12933268 | SY0567AQ | Taqman | SY0567AA1FM | CAAGGGTAACGATTTTCAG | 286 |
| SY0567AQ | 12933268 | SY0567AQ | Taqman | SY0567AA2TT | CAAGGGTAACGATTTTCTG | 287 |
| IGGY2850 | 12940106 | IGGY2850 | Illumina Golden Gate | | | |
| IGGY2850 | 12940106 | IGGY2850 | Illumina Golden Gate | IGGY2850F3 | ATTTGGGTTTTAGAGAACATAAGG | 43 |
| IGGY2850 | 12940106 | IGGY2850 | Illumina Golden Gate | IGGY2850F1 | ACTTCGTCAGTAACGGACGGGGGTTGTTGCATTTGTGCTTAGG | 44 |
| IGGY2850 | 12940106 | IGGY2850 | Illumina Golden Gate | IGGY2850F2 | GAGTCGAGGTCATATCGTGGGGGTTGTTGCATTTGTGCTTAGC | 45 |
| SY4432 | 12940376 | SY4432 | Taqman | | | |
| SY4432 | 12940376 | SY4432 | Taqman | SY4432F1 | TGTGAAGACCCTGACATGTTTC | 46 |
| SY4432 | 12940376 | SY4432 | Taqman | SY4432R1 | GCAACTCTTGCAGATTCAGACAATG | 47 |
| SY4432 | 12940376 | SY4432 | Taqman | SY4432A1FM | AAGACACCGAGCAACATC | 288 |
| SY4432 | 12940376 | SY4432 | Taqman | SY4432A2TT | ACACCGGGCAACATC | 289 |
| SY4336 | 12940400 | SY4336 | Taqman | | | |
| SY4336 | 12940400 | SY4336 | Taqman | SY4336F1 | AGTGGTTCAATTTGAGGTGTCATC | 48 |
| SY4336 | 12940400 | SY4336 | Taqman | SY4336R1 | GGTGAAGAACATCTCTAGAAAACACTTA | 49 |
| SY4336 | 12940400 | SY4336 | Taqman | SY433641FM | CGCCACCATCGTAA | 290 |
| SY4336 | 12940400 | SY4336 | Taqman | SY4336A2TT | ACGCCACCATCTTAA | 291 |
| SY4435 | 12940422 | SY4435 | Taqman | | | |
| SY4435 | 12940422 | SY4435 | Taqman | SY4435F1 | AAGATTCCCGACGAGAGCGT | 50 |
| SY4435 | 12940422 | SY4435 | Taqman | SY4435R1 | CAGTGGTGGCCTCAATGGA | 51 |
| SY4435 | 12940422 | SY4435 | Taqman | SY4435A1FM | ACGCGCCGTAATACG | 292 |
| SY4435 | 12940422 | SY4435 | Taqman | SY4435A2TT | AACGCGCTGTAATACG | 293 |
| SY4439 | 12940448 | SY4439 | Taqman | | | |
| SY4439 | 12940448 | SY4439 | Taqman | SY4439F1 | TGGGTCCACCCGCTTC | 52 |
| SY4439 | 12940448 | SY4439 | Taqman | SY4439R1 | CAAGATCAAGTCAACGGTCAACGA | 53 |
| SY4439 | 12940448 | SY4439 | Taqman | SY4439A1FM | AATCGGCGAAGACAGTGAAC | 294 |
| SY4439 | 12940448 | SY4439 | Taqman | SY4439A2TT | ATCGGCGAAGACGGTGAA | 295 |
| IGGY3104 | 12940605 | IGGY3104 | Illumina Golden Gate | | | |
| IGGY3104 | 12940605 | IGGY3104 | Illumina Golden Gate | IGGY3104F3 | TAGCAGATCCGGTATAATTAACT | 54 |
| IGGY3104 | 12940605 | IGGY3104 | Illumina Golden Gate | IGGY3104F1 | ACTTCGTCAGTAACGGACTCATCATCATCAGAAGTCTCTCTAGTG | 55 |
| IGGY3104 | 12940605 | IGGY3104 | Illumina Golden Gate | IGGY3104F2 | GAGTCGAGGTCATATCGTTCATCATCATCAGAAGTCTCTCTAGTC | 56 |
| SY4418 | 12940610 | SY4418 | Taqman | | | |
| SY4418 | 12940610 | SY4418 | Taqman | SY4418F1 | GGCATTCCCGCTCCATTAGTAG | 57 |
| SY4418 | 12940610 | SY4418 | Taqman | SY4418R1 | CAACAGCTGCAGGAACCAAA | 58 |
| SY4418 | 12940610 | SY4418 | Taqman | SY4418A1FM | CCGGAAGCACTTGTACAG | 296 |
| SY4418 | 12940610 | SY4418 | Taqman | SY4418A2TT | CCGGAAGCACTTTTACAG | 297 |
| IGGY2851 | 12940655 | IGGY2851 | Illumina Golden Gate | | | |
| IGGY2851 | 12940655 | IGGY2851 | Illumina Golden Gate | IGGY2851F3 | TTCAACGGACATGTCATTTT | 59 |
| IGGY2851 | 12940655 | IGGY2851 | Illumina Golden Gate | IGGY2851F1 | ACTTCGTCAGTAACGGACGCAGCTCCTTCGCTTTCTGCTTGT | 60 |
| IGGY2351 | 12940655 | IGGY2851 | Illumina Golden Gate | IGGY2851F2 | GAGTCGAGGTCATATCGTGCAGCTCCTTCGCTTTCTGCTTGC | 61 |
| SY4440 | 12940854 | SY4440 | Taqman | | | |
| SY4440 | 12940854 | SY4440 | Taqman | SY4440F1 | CGTGCATTGAGCAAGAGTATACAGA | 62 |
| SY4440 | 12940854 | SY4440 | Taqman | SY4440R1 | CCATAGTTAAGCTGGCCCAAGAG | 63 |
| SY4440 | 12940854 | SY4440 | Taqman | SY4440A1FM | TCAATTTTAATGATTTCGTGAC | 298 |
| SY4440 | 12940854 | SY4440 | Taqman | SY4440A2TT | TCAATTTTAATGATTTGGTGACA | 299 |
| SY0127AQ | 12948965 | SY0127AQ | Taqman | | | |
| SY0127AQ | 12948965 | SY0127AQ | Taqman | SY0127AF1 | GCAGAATTTCCTTGGAGGTCAAAC | 64 |
| SY0127AQ | 12948965 | SY0127AQ | Taqman | SY0127AR1 | CCCCTCTTTCCAATATTTAATACAAGATTCAGT | 65 |
| SY0127AQ | 12948965 | SY0127AQ | Taqman | SY0127AA1FM | CGGTAAGAGTAATAATACA | 300 |
| SY0127AQ | 12948965 | SY0127AQ | Taqman | SY0127AA2TT | CGGTAAGAGTAACAATACA | 301 |
| SY1044BQ | 12973395 | SY1044BQ | Taqman | | | |
| SY1044BQ | 12973395 | SY1044BQ | Taqman | SY1044BF1 | CAAGAAAACTAAATGAATCACTGT | 66 |
| SY1044BQ | 12973395 | SY1044BQ | Taqman | SY1044BR1 | AGCCACAAGCAAATTCCTC | 67 |
| SY1044BQ | 12973395 | SY1044BQ | Taqman | SY1044BA1FM | CCTTTCTTCACCATG | 302 |
| SY1044BQ | 12973395 | SY1044BQ | Taqman | SY1044BA2TT | AGTTCCTTTCTTCATCA | 303 |
| SY0571AQ | 12976368 | SY0571AQ | Taqman | | | |
| SY0571AQ | 12976368 | SY0571AQ | Taqman | SY0571AF1 | GCTAAGCGGATAGAAGACTTGAC | 68 |
| SY0571AQ | 12976368 | SY0571AQ | Taqman | SY0571AR1 | GCACCAGCCAGAAGACAGTT | 69 |
| SY0571AQ | 12976368 | SY0571AQ | Taqman | SY0571AA1FM | ATTGCTTCATGCCGT | 304 |
| SY0571AQ | 12976368 | SY0571AQ | Taqman | SY0571AA2TT | ATTGCTTCATGCTGTG | 305 |
| SY0096C | 12976596 | SY0096C | Taqman | | | |
| SY0096C | 12976596 | SY0096C | Taqman | SY0096CF1 | AAAACAAACCACATGAGATGTATAGACAGT | 70 |
| SY0096C | 12976596 | SY0096C | Taqman | SY0096CR1 | TTTTGGATTGTGATGCTTTAATAATTGTGGAT | 71 |
| SY0096C | 12976596 | SY0096C | Taqman | SY0096CA1FM | CAGTGGGTAGAGTGAAA | 306 |
| SY0096C | 12976596 | SY0096C | Taqman | SY0096CA2VC | AGTGGGTAGAGAGAAA | 307 |
| SY0096A | 12976600 | SY0096A | Taqman | | | |
| SY0096A | 12976600 | SY0096A | Taqman | SY0096AF1 | AGACAAAACCACCAGCACCAA | 72 |
| SY0096A | 12976600 | SY0096A | Taqman | SY0096AR1 | AGGCACAAGGTAGAAGAGGAGATT | 73 |
| SY0096A | 12976600 | SY0096A | Taqman | SY0096AA1FM | CAGTAGCTGCTGCCGC | 308 |
| SY0096A | 12976600 | SY0096A | Taqman | SY0096AA2VC | CAGTAGCTGCCGCCGC | 309 |
| SY0569AQ | 12976666 | SY0569AQ | Taqman | | | |
| SY0569AQ | 12976666 | SY0569AQ | Taqman | SY0569AF1 | TCGGGAAGATGCTGGACA | 74 |
| SY0569AQ | 12976666 | SY0569AQ | Taqman | SY0569AR1 | TCGAAATACCAAGGCCAAGATG | 75 |
| SY0569AQ | 12976666 | SY0569AQ | Taqman | SY0569AA1FM | AGGACTTTGGAACCATG | 310 |
| SY0569AQ | 12976666 | SY0569AQ | Taqman | SY0569AA2TT | ACTTTGGAACCGTGTC | 311 |
| IGGY476 | 12977396 | IGGY476 | Illumina Golden Gate | | | |
| IGGY476 | 12977396 | IGGY476 | Illumina Golden Gate | IGGY476F3 | TCTTCCATGGTTCACTAGAATG | 76 |
| IGGY476 | 12977396 | IGGY476 | Illumina Golden Gate | IGGY476F1 | ACTTCGTCAGTAACGGACACACTCGCGGAACGTTGAACAG | 77 |
| IGGY476 | 12977396 | IGGY476 | Illumina Golden Gate | IGGY476F2 | GAGTCGAGGTCATATCGTACACTCGCGGAACGTTGAACAC | 78 |
| IGGY515 | 12977667 | IGGY515 | Illumina Golden Gate | | | |
| IGGY515 | 12977667 | IGGY515 | Illumina Golden Gate | IGGY515F3 | AACAGAAGACAAATACCTAGTGTG | 79 |
| IGGY515 | 12977667 | IGGY515 | Illumina Golden Gate | IGGY515F1 | ACTTCGTCAGTAACGGACGGAAAAGGGAACCAAGATAAAGTATATTCCA | 80 |
| IGGY515 | 12977667 | IGGY515 | Illumina Golden Gate | IGGY515F2 | GAGTCGAGGTCATATCGTGGAAAAGGGAACCAAGATAAAGTATATTCCG | 81 |
| SY3108 | 12979617 | SY3108 | Taqman | | | |
| SY3108 | 12979617 | SY3108 | Taqman | SY3108F1 | GTAACCCCAACTGACAAACACA | 82 |
| SY3108 | 12979617 | SY3108 | Taqman | SY3108R1 | TGCTCAAGATGGTGCATGCTT | 83 |
| SY3108 | 12979617 | SY3108 | Taqman | SY3108A1FM | ACTACCATCACAATAAGC | 312 |
| SY3108 | 12979617 | SY3108 | Taqman | SY3108A2TT | ACCATCACAATATGCAT | 313 |
| SY3112 | 12979655 | SY3112 | Taqman | | | |
| SY3112 | 12979655 | SY3112 | Taqman | SY3112F1 | CAAATTTTATGATACGTGCAGTTAAGC | 84 |
| SY3112 | 12979655 | SY3112 | Taqman | SY3112R1 | TCCCTCCCACATATACATCATCACTT | 85 |
| SY3112 | 12979655 | SY3112 | Taqman | SY3112A1FM | TTGGCGCACTTGGT | 314 |
| SY3112 | 12979655 | SY3112 | Taqman | SY3112A2TT | TGGCGCACTTTGTC | 315 |
| SY3110 | 12979670 | SY3110 | Taqman | | | |
| SY3110 | 12979670 | SY3110 | Taqman | SY3110F1 | ACCCCTGATGGTAATCTTTGAAAA | 86 |
| SY3110 | 12979670 | SY3110 | Taqman | SY3110R1 | GAACCGTGAGTATTTGGGACAGA | 87 |
| SY3110 | 12979670 | SY3110 | Taqman | SY3110A1FM | TAAAGATGTGTATTTTAACTT | 316 |
| SY3110 | 12979670 | SY3110 | Taqman | SY3110A2TT | AAAGATGTGTATTTTGACT | 317 |
| SY3114 | 12979695 | SY3114 | Taqman | | | |
| SY3114 | 12979695 | SY3114 | Taqman | SY3114F1 | GGGATCGGGCCTCCAAA | 88 |
| SY3114 | 12979695 | SY3114 | Taqman | SY3114R1 | TGCCAGGCTAAACAAATTGAATAC | 89 |
| SY3114 | 12979695 | SY3114 | Taqman | SY3114A1FM | TTTCCCTCAAGATAGAG | 318 |
| SY3114 | 12979695 | SY3114 | Taqman | SY3114A2TT | TTTCCCTCAAGATTGA | 319 |
| IGGY2357 | 12980624 | IGGY2357 | Illumina Golden Gate | | | |
| IGGY2357 | 12980624 | IGGY2357 | Illumina Golden Gate | IGGY2357F3 | TGAACTTCAACATTTGGTTTTT | 90 |
| IGGY2357 | 12980624 | IGGY2357 | Illumina Golden Gate | IGGY2357F1 | ACTTCGTCAGTAACGGACCGATTGAAAAGTGAAAATTCGTCATG | 91 |
| IGGY2357 | 12980624 | IGGY2357 | Illumina Golden Gate | IGGY2357F2 | GAGTCGAGGTCATATCGTCGATTGAAAAGTGAAAATTCGTCATC | 92 |
| SY3121 | 12980630 | SY3121 | Taqman | | | |
| SY3121 | 12980630 | SY3121 | Taqman | SY3121F1 | TCACCAAAGACAACAGCCTTG | 93 |
| SY3121 | 12980630 | SY3121 | Taqman | SY3121R1 | CGTCTTCGCTAGGACCTGAA | 94 |
| SY3121 | 12980630 | SY3121 | Taqman | SY3121A1FM | TCAACCAACAACCATG | 320 |
| SY3121 | 12980630 | SY3121 | Taqman | SY3121A2TT | TCAACCAACCACCAT | 321 |
| SY3148 | 12980667 | SY3148 | Taqman | | | |
| SY3148 | 12980667 | SY3148 | Taqman | SY3148F1 | GCGTGCGCTACAAGTCAGG | 95 |
| SY3148 | 12980667 | SY3148 | Taqman | SY3148R1 | GGTGAGGCAGCAGAAACAG | 96 |
| SY3148 | 12980667 | SY3148 | Taqman | SY3148A1FM | CAGCGAGTCCAACATT | 322 |
| SY3148 | 12980667 | SY3148 | Taqman | SY3148A2TT | AGCGAGTCCAACGTTT | 323 |
| SY3005 | 12980686 | SY3005 | Taqman | | | |
| SY3005 | 12980686 | SY3005 | Taqman | SY3005F1 | CAGGAAAGGGACCCTTGGAAA | 97 |
| SY3005 | 12980686 | SY3005 | Taqman | SY3005R1 | GTGGCATAAGCCCAAGCATT | 98 |
| SY3005 | 12980686 | SY3005 | Taqman | SY3005A1FM | CTGACCCAGTAAACAAC | 324 |
| SY3005 | 12980686 | SY3005 | Taqman | SY3005A2TT | CTGACCCAGTCAACA | 325 |
| SY4235 | 12981079 | SY4235 | Taqman | | | |
| SY4235 | 12981079 | SY4235 | Taqman | SY4235F1 | AGCCTCTGGTGGTAAGGATAAAG | 93 |
| SY4235 | 12981079 | SY4235 | Taqman | SY4235R1 | TGAAATCCATGCATCCGCAAA | 100 |
| SY4235 | 12981079 | SY4235 | Taqman | SY4235A1FM | CATTGAGATTGCACTTCGT | 326 |
| SY4235 | 12981079 | SY4235 | Taqman | SY4235A2TT | CCATTGAGATTGTACTTCGT | 327 |
| SY4433 | 12981180 | SY4433 | Taqman | | | |
| SY4433 | 12981180 | SY4433 | Taqman | SY4433F1 | TCAGAGCACTCCATATTGCTTCAG | 101 |
| SY4433 | 12981180 | SY4433 | Taqman | SY4433R1 | ATCCCCTGTACGAGGAAGTTTTG | 102 |
| SY4433 | 12981180 | SY4433 | Taqman | SY4433A1FM | TCGTGTGATTTTCATCATC | 328 |
| SY4433 | 12981180 | SY4433 | Taqman | SY4433A2TT | CGTGTGATTTTGATCATCA | 329 |
| SY4434 | 12981186 | SY4434 | Taqman | | | |
| SY4434 | 12981186 | SY4434 | Taqman | SY4434F1 | CGCCGTCTTCATCGTCGTTT | 103 |
| SY4434 | 12981186 | SY4434 | Taqman | SY4434R1 | TTTGCGGAGAACCCAATTTCC | 104 |
| SY4434 | 12981186 | SY4434 | Taqman | SY4434A1FM | ACCCGAAACTCGCACG | 330 |
| SY4434 | 12981186 | SY4434 | Taqman | SY4434A2TT | CGAAACTTGCACGCAC | 331 |
| IGGY3105 | 12981327 | IGGY3105 | Illumina Golden Gate | | | |
| IGGY3105 | 12981327 | IGGY3105 | Illumina Golden Gate | IGGY3105F3 | AAACTAATAGTAATGTAGCTCCTTTG | 105 |
| IGGY3105 | 12981327 | IGGY3105 | Illumina Golden Gate | IGGY3105F1 | ACTTCGTCAGTAACGGACGTCACGATTTCTTCTTCCCAAGTAAAA | 106 |
| IGGY3105 | 12981327 | IGGY3105 | Illumina Golden Gate | IGGY3105F2 | GAGTCGAGGTCATATCGTGTCACGATTTCTTCTTCCCAAGTAAAG | 107 |
| SY3889 | 12981395 | SY3889 | Taqman | | | |
| SY3889 | 12981395 | SY3889 | Taqman | SY3889F1 | GCAAGGCAACAATCTGAATGGT | 108 |
| SY3889 | 12981395 | SY3889 | Taqman | SY3889R1 | TCCACGGCATGCTTGGTATC | 109 |
| SY3889 | 12981395 | SY3889 | Taqman | SY3889A1FM | CCAACATCCATCGAA | 332 |
| SY3889 | 12981395 | SY3889 | Taqman | SY3889A2TT | TACCAACATCCATTGAA | 333 |
| IGGY3103 | 12981397 | IGGY3103 | Illumina Golden Gate | | | |
| IGGY3103 | 12981397 | IGGY3103 | Illumina Golden Gate | IGGY3103F3 | CTTCTCCCCTGAAAGGTATGT | 110 |
| IGGY3103 | 12981397 | IGGY3103 | Illumina Golden Gate | IGGY3103F1 | ACTTCGTCAGTAACGGACGGGTGATGGAGATGATAGCCCATTTT | 111 |
| IGGY3103 | 12981397 | IGGY3103 | Illumina Golden Gate | IGGY3103F2 | GAGTCGAGGTCATATCGTGGGTGATGGAGATGATAGCCCATTTC | 112 |
| IGGY3106 | 12981417 | IGGY3106 | Illumina Golden Gate | | | |
| IGGY3106 | 12931417 | IGGY3106 | Illumina Golden Gate | IGGY3106F3 | CTAACACAAGCTTTACCATTCTT | 113 |
| IGGY3106 | 12981417 | IGGY3106 | Illumina Golden Gate | IGGY3106F1 | ACTTCGTCAGTAACGGACGTGCAGATAGCATACATCATATACAAATGA | 114 |
| IGGY3106 | 12981417 | IGGY3106 | Illumina Golden Gate | IGGY3106F2 | GAGTCGAGGTCATATCGTGTGCAGATAGCATACATCATATACAAATGG | 115 |
| SY0871AQ | 12981920 | SY0871AQ | Taqman | | | |
| SY0871AQ | 12981920 | SY0871AQ | Taqman | SY0871AF1 | GAGGTCCATTGCTTCCTCTGCT | 116 |
| SY0871AQ | 12981920 | SY0871AQ | Taqman | SY0871AR1 | TGGTGGAGATCCACGTTCTAAAG | 117 |
| SY0871AQ | 12981920 | SY0871AQ | Taqman | SY0871AA1FM | CTCGTCAATTTCATCAA | 334 |
| SY0871AQ | 12981920 | SY0871AQ | Taqman | SY0871AA2TT | CTCGTCAATTTCTTCAA | 335 |
| SY0099E | 23543290 | SY0099E | Taqman | | | |
| SY0099E | 23543290 | SY0099E | Taqman | SY0099EF1 | TGTGATGCCGAAGCTAGACATG | 118 |
| SY0099E | 23543290 | SY0099E | Taqman | SY0099ER1 | CTCAACAAGTTCTGTCACCAAAGTT | 119 |
| SY0099E | 23543290 | SY0099E | Taqman | SY0099EA1FM | CAGCAACGAGGTAAG | 336 |
| SY0099E | 23543290 | SY0099E | Taqman | SY0099EA2TT | CAGCAACAAGGTAAG | 337 |
| SY4353 | 56017303 | SY4353 | Taqman | | | |
| SY4353 | 56017303 | SY4353 | Taqman | SY4353F1 | CCTCAGGCCTCATGATTGTCTT | 120 |
| SY4353 | 56017303 | SY4353 | Taqman | SY4353R1 | CACCATTAAATTTTACCCGGCTGT | 121 |
| SY4353 | 56017303 | SY4353 | Taqman | SY4353A1FM | CATGATGTACTAACGCAGTA | 338 |
| SY4353 | 56017303 | SY4353 | Taqman | SY4353A2TT | TCATGATGTACTAATGCAGTA | 339 |
| SY4354 | 56017304 | SY4354 | Taqman | | | |
| SY4354 | 56017304 | SY4354 | Taqman | SY4354F1 | CCACATCCACCCAACATGAAG | 122 |
| SY4354 | 56017304 | SY4354 | Taqman | SY4354R1 | CCTGAAGACTAACTGGTTACGTGAA | 123 |
| SY4354 | 56017304 | SY4354 | Taqman | SY4354A1FM | CCTATAAATAAGGAACCAGGT | 340 |
| SY4354 | 56017304 | SY4354 | Taqman | SY4354A2TT | CCTATAAATAAGGAACCTGG | 341 |
| SY4329 | 56017305 | SY4329 | Taqman | | | |
| SY4329 | 56017305 | SY4329 | Taqman | SY4329F1 | AGTGCTACAACTACACCTACACC | 124 |
| SY4329 | 56017305 | SY4329 | Taqman | SY4329R1 | GGGCTTCTTCTGTCACTGGTT | 125 |
| SY4329 | 56017305 | SY4329 | Taqman | SY4329A1FM | TCATTACACAATAGCATTTTC | 342 |
| SY4329 | 56017305 | SY4329 | Taqman | SY4329A2TT | CATTACACAATAGCCTTTTC | 343 |
| SY4349 | 56017307 | SY4349 | Taqman | | | |
| SY4349 | 56017307 | SY4349 | Taqman | SY4349F1 | CTGTTAATACCCAGTACTATGCTACA | 126 |
| SY4349 | 56017307 | SY4349 | Taqman | SY4349R1 | CTCCCACTATTCCTTGCCATCTC | 127 |
| SY4349 | 56017307 | SY4349 | Taqman | SY4349A1FM | TGAGAATCAACATGTGAGT | 344 |
| SY4349 | 56017307 | SY4349 | Taqman | SY4349A2TT | AGAATCAACATGTGGGTAA | 345 |
| SY4358 | 56017308 | SY4358 | Taqman | | | |
| SY4358 | 56017308 | SY4358 | Taqman | SY4358F1 | CCATAGCTTAATGCCACGATGTTG | 128 |
| SY4358 | 56017308 | SY4358 | Taqman | SY4358R1 | ACCAGACCATCGGCCTTCA | 129 |
| SY4358 | 56017308 | SY4358 | Taqman | SY4358A1FM | AATCCTGTACGACGGTAA | 346 |
| SY4358 | 56017308 | SY4358 | Taqman | SY4358A2TT | TCCTGTACGACTGTAAG | 347 |
| SY4324 | 56017310 | SY4324 | Taqman | | | |
| SY4324 | 56017310 | SY4324 | Taqman | SY4324F1 | GTTGTGGCTCGGCTTTATGATG | 130 |
| SY4324 | 56017310 | SY4324 | Taqman | SY4324R1 | ACAAGGCACAAGTACACATGCTC | 131 |
| SY4324 | 56017310 | SY4324 | Taqman | SY4324A1FM | TTGAACATAAAAGGACAATGG | 348 |
| SY4324 | 56017310 | SY4324 | Taqman | SY4324A2TT | TTGAACATAAAAGGGCAATGG | 349 |
| SY4234 | 56017312 | SY4234 | Taqman | | | |
| SY4234 | 56017312 | SY4234 | Taqman | SY4234F1 | GGTCGTGCTTTCATATTGGTTCCT | 132 |
| SY4234 | 56017312 | SY4234 | Taqman | SY4234R1 | GCGAGTGTGCAAAGGGTTT | 133 |
| SY4234 | 56017312 | SY4234 | Taqman | SY4234A1FM | AGGCATTAGTTGTGCTTCTT | 350 |
| SY4234 | 56017312 | SY4234 | Taqman | SY4234A2TT | AGGCATTAGTTGTGCTTTTT | 351 |
| SY4231 | 56017315 | SY4231 | Taqman | | | |
| SY4231 | 56017315 | SY4231 | Taqman | SY4231F1 | GTAGCAGCCAACAATGCTTTC | 134 |
| SY4231 | 56017315 | SY4231 | Taqman | SY4231R1 | TGGCCCCTGCATGTATACTTTC | 135 |
| SY4231 | 56017315 | SY4231 | Taqman | SY4231A1FM | TCTGCAACAATCAACATTT | 352 |
| SY4231 | 56017315 | SY4231 | Taqman | SY4231A2TT | ATCTGCAACAATCAGCATTT | 353 |
| SY4224 | 56017318 | SY4224 | Taqman | | | |
| SY4224 | 56017318 | SY4224 | Taqman | SY4224F1 | GGCTCCATGAGACGAAATAAAGC | 136 |
| SY4224 | 56017318 | SY4224 | Taqman | SY4224R1 | GAGGGCACAAGATTGGTATTGTTG | 137 |
| SY4224 | 56017318 | SY4224 | Taqman | SY4224A1FM | TGGGAAGTCTACTCTGAT | 354 |
| SY4224 | 56017313 | SY4224 | Taqman | SY4224A2TT | AGTGGGAAGTCTACTCTTAT | 355 |
| SY4335 | 56017319 | SY4335 | Taqman | | | |
| SY4335 | 56017319 | SY4335 | Taqman | SY4335F1 | CAAGCTGGTCTTGTACAGTTGAG | 138 |
| SY4335 | 56017319 | SY4335 | Taqman | SY4335R1 | ACCAACTACTCGTTAAGCAAGGA | 139 |
| SY4335 | 56017319 | SY4335 | Taqman | SY4335A1FM | AAGCTTCTGGCCAAAG | 356 |
| SY4335 | 56017319 | SY4335 | Taqman | SY4335A2TT | TCTGGCCATAGCTA | 357 |
| SY4213 | 56017321 | SY4213 | Taqman | | | |
| SY4213 | 56017321 | SY4213 | Taqman | SY4213F1 | GCTACCAAGTTGCAGAACATTATGA | 140 |
| SY4213 | 56017321 | SY4213 | Taqman | SY4213R1 | TCCGAGAAAGGGACTGAAAATGAG | 141 |
| SY4213 | 56017321 | SY4213 | Taqman | SY4213A1FM | AGACTATAAAAATGACCAAATT | 358 |
| SY4213 | 56017321 | SY4213 | Taqman | SY4213A2TT | AGACTATAAAAATGACCAATTT | 359 |
| SY4227 | 56017322 | SY4227 | Taqman | | | |
| SY4227 | 56017322 | SY4227 | Taqman | SY4227F1 | GCAGAAAACAGATTATCAGGGCTTA | 142 |
| SY4227 | 56017322 | SY4227 | Taqman | SY4227R1 | GAGTTGAATGTCACTTAGGTAGCAA | 143 |
| SY4227 | 56017322 | SY4227 | Taqman | SY4227A1FM | CTTGGATTGGGAGCAAATTAC | 360 |
| SY4227 | 56017322 | SY4227 | Taqman | SY4227A2TT | TGGATTGGGAGCGAATTAC | 361 |
| SY4220 | 56017329 | SY4220 | Taqman | | | |
| SY4220 | 56017329 | SY4220 | Taqman | SY4220F1 | TGAGCCCCATTCAGTTGAGAA | 144 |
| SY4220 | 56017329 | SY4220 | Taqman | SY4220R1 | GCTGTTTTGGGCACATGATGA | 145 |
| SY4220 | 56017329 | SY4220 | Taqman | SY4220A1FM | TTGTAGACTGCGTTTTCTG | 362 |
| SY4220 | 56017329 | SY4220 | Taqman | SY4220A2TT | TACTTGTAGACTGTGTTTTC | 363 |
| SY4343 | 56021709 | SY4343 | Taqman | | | |
| SY4343 | 56021709 | SY4343 | Taqman | SY4343F1 | GGGAAGCTAATCCGAGAACTGA | 146 |
| SY4343 | 56021709 | SY4343 | Taqman | SY4343R1 | TGACACCAGATGAGAAACAGGAG | 147 |
| SY4343 | 56021709 | SY4343 | Taqman | SY4343A1FM | TGCATAACAAAAACCATGATTAAA | 364 |
| SY4343 | 56021709 | SY4343 | Taqman | SY4343A2TT | TGCATAACAAAAACCATGTTTAAA | 365 |
| SY4316 | 56021714 | SY4316 | Taqman | | | |
| SY4316 | 56021714 | SY4316 | Taqman | SY4316F1 | GAAAAGGGAGGAGTGATCTGATAC | 148 |
| SY4316 | 56021714 | SY4316 | Taqman | SY4316R1 | ACCCAGCCTAAGAAATATAATGAAGATAC | 149 |
| SY4316 | 56021714 | SY4316 | Taqman | SY4316A1FM | CCAGTAAAATAATGCTCAA | 366 |
| SY4316 | 56021714 | SY4316 | Taqman | SY4316A2TT | TGCCAGTAAAATAATGTTC | 367 |
| SY4225 | 56021721 | SY4225 | Taqman | | | |
| SY4225 | 56021721 | SY4225 | Taqman | SY4225F1 | TTTGGGTGTTCTGTGATGGA | 150 |
| SY4225 | 56021721 | SY4225 | Taqman | SY4225R1 | GGCATATCATTAGGGAAGTCCGA | 151 |
| SY4225 | 56021721 | SY4225 | Taqman | SY4225A1FM | CACAAACTTGCCAACTA | 368 |
| SY4225 | 56021721 | SY4225 | Taqman | SY4225A2TT | CACAAACTTGCGAACTATT | 369 |
| SY4219 | 56021724 | SY4219 | Taqman | | | |
| SY4219 | 56021724 | SY4219 | Taqman | SY4219F1 | ACGCTTGACTGAAGATGATACAAC | 152 |
| SY4219 | 56021724 | SY4219 | Taqman | SY4219R1 | AAGTTAATGCAGAACCGTGTGTTTT | 153 |
| SY4219 | 56021724 | SY4219 | Taqman | SY4219A1FM | TCATTTAACCGCTCATTTA | 370 |
| SY4219 | 56021724 | SY4219 | Taqman | SY4219A2TT | TGGATCATTTAACCGTTCATTT | 371 |
| SY4326 | 56021730 | SY4326 | Taqman | | | |
| SY4326 | 56021730 | SY4326 | Taqman | SY4326F1 | GCTTGACAGCTTTGGATGTTCTTC | 154 |
| SY4326 | 56021730 | SY4326 | Taqman | SY4326R1 | GTCACTCGCACAACACTATACTAC | 155 |
| SY4326 | 56021730 | SY4326 | Taqman | SY4326A1FM | CTGAGACAGAGATATCAGATT | 372 |
| SY4326 | 56021730 | SY4326 | Taqman | SY4326A2TT | TGAGACAGAGATATCAGGTT | 373 |
| SY4232 | 56021731 | SY4232 | Taqman | | | |
| SY4232 | 56021731 | SY4232 | Taqman | SY4232F1 | CCTTGATATCGAGCATTTCCTTCCT | 156 |
| SY4232 | 56021731 | SY4232 | Taqman | SY4232R1 | TTCGGAGAAGGTTTTGATTTGTTC | 157 |
| SY4232 | 56021731 | SY4232 | Taqman | SY4232A1FM | TCCAGTCCTAACAATTCAA | 374 |
| SY4232 | 56021731 | SY4232 | Taqman | SY4232A2TT | AGTCCAGTCCTAATAATTCAA | 375 |
| SY4330 | 56021742 | SY4330 | Taqman | | | |
| SY4330 | 56021742 | SY4330 | Taqman | SY4330F1 | TGAAGAGAGATCAGATTAAAGAGAGTGA | 158 |
| SY4330 | 56021742 | SY4330 | Taqman | SY4330R1 | TGTAGAGTCTCCTGGCCAAA | 159 |
| SY4330 | 56021742 | SY4330 | Taqman | SY4330A1FM | CACAATGATTTTTCCTG | 376 |
| SY4330 | 56021742 | SY4330 | Taqman | SY4330A2TT | ACAATGATTTTTGTTC | 377 |
| SY4325 | 56021749 | SY4325 | Taqman | | | |
| SY4325 | 56021749 | SY4325 | Taqman | SY4325F1 | CCTCTCCCTCATATTCCATTGCTT | 160 |
| SY4325 | 56021749 | SY4325 | Taqman | SY4325R1 | TGGCACTACCCACATGAAC | 161 |
| SY4325 | 56021749 | SY4325 | Taqman | SY4325A1FM | CATGTGTGCAACGGAAA | 378 |
| SY4325 | 56021749 | SY4325 | Taqman | SY4325A2TT | CATGTGTGCATCGGAAA | 379 |
| SY4217 | 56021750 | SY4217 | Taqman | | | |
| SY4217 | 56021750 | SY4217 | Taqman | SY4217F1 | TGCAAACAATGTAGCCCAATCAC | 162 |
| SY4217 | 56021750 | SY4217 | Taqman | SY4217R1 | TGCATGAATGACTTTTCTATTGGAGA | 163 |
| SY4217 | 56021750 | SY4217 | Taqman | SY4217A1FM | TTGGAGATACTCCTAGG | 380 |
| SY4217 | 56021750 | SY4217 | Taqman | SY4217A2TT | TTGGAGATACTCTTAGGA | 381 |
| SY4215 | 56021751 | SY4215 | Taqman | | | |
| SY4215 | 56021751 | SY4215 | Taqman | SY4215F1 | GTCCAACAGGTAAGTTAAACAACTATGA | 164 |
| SY4215 | 56021751 | SY4215 | Taqman | SY4215R1 | AAACGAACAATCTTGGACAAGCA | 165 |
| SY4215 | 56021751 | SY4215 | Taqman | SY4215A1FM | CCAAATAACACGAGTACT | 382 |
| SY4215 | 56021751 | SY4215 | Taqman | SY4215A2TT | TAACACGAGTTCTCGT | 383 |
| SY4322 | 56021755 | SY4322 | Taqman | | | |
| SY4322 | 56021755 | SY4322 | Taqman | SY4322F1 | ACAAAGAGTACACGTAATATCACACG | 166 |
| SY4322 | 56021755 | SY4322 | Taqman | SY4322R1 | GTCTCGGATATTTTCTGTTAGTCCAA | 167 |
| SY4322 | 56021755 | SY4322 | Taqman | SY4322A1FM | CATGCATCATGACC | 384 |
| SY4322 | 56021755 | SY4322 | Taqman | SY4322A2TT | CATGCATCATGGCC | 385 |
| SY4344 | 56021756 | SY4344 | Taqman | | | |
| SY4344 | 56021756 | SY4344 | Taqman | SY4344F1 | AAGGGTGATGGAGACAGATAGGA | 168 |
| SY4344 | 56021756 | SY4344 | Taqman | SY4344R1 | CGTGTACTCTTTGTCTGATTGGAA | 169 |
| SY4344 | 56021756 | SY4344 | Taqman | SY4344A1FM | CGTATTGCCCCTTTC | 386 |
| SY4344 | 56021756 | SY4344 | Taqman | SY4344A2TT | ATGTCGTATTGCCTCTTTC | 387 |
| SY4360 | 266863987 | SY4360 | Taqman | | | |
| SY4360 | 266863987 | SY4360 | Taqman | SY4360F1 | GGGAGGTTATGTTGCCTTGCT | 170 |
| SY4360 | 266863987 | SY4360 | Taqman | SY4360R1 | GCCAAGGACCAAAGGACTTAC | 171 |
| SY4360 | 266863987 | SY4360 | Taqman | SY4360A1FM | TTTGTTTAATTTCAGCTATATC | 388 |
| SY4360 | 266863987 | SY4360 | Taqman | SY4360A2TT | AATTTGTTTAATTTCTGCTATATC | 389 |
| SY4208 | 266863989 | SY4208 | Taqman | | | |
| SY4208 | 266363989 | SY4208 | Taqman | SY4208F1 | GTGCATAACATGTGCTTCTATAGGTT | 172 |
| SY4208 | 266863989 | SY4208 | Taqman | SY4208R1 | AGCACAAAGGATTCCACAACA | 173 |
| SY4208 | 266863989 | SY4208 | Taqman | SY4208A1FM | CTTTGCATCATTTATCCC | 390 |
| SY4208 | 266863989 | SY4208 | Taqman | SY4208A2TT | CCTTTGCATCATTTGTC | 391 |
| SY4210 | 266863990 | SY4210 | Taqman | | | |
| SY4210 | 266863990 | SY4210 | Taqman | SY4210F1 | GCCAAGGACCAAAGGACTTAC | 174 |
| SY4210 | 266863990 | SY4210 | Taqman | SY4210R1 | GGGAGGTTATGTTGCCTTGCTAT | 175 |
| SY4210 | 266863990 | SY4210 | Taqman | SY4210A1FM | CTATATCAAGTGCCTT | 392 |
| SY4210 | 266863990 | SY4210 | Taqman | SY4210A2TT | CTATATCAAGTGCTTTT | 393 |
| SY4207 | 266363993 | SY4207 | Taqman | | | |
| SY4207 | 266863993 | SY4207 | Taqman | SY4207F1 | CCAAGGAAGGGACAAATGATACAAAG | 176 |
| SY4207 | 266863993 | SY4207 | Taqman | SY4207R1 | TGCAGTCCATGCCATATTCAAAC | 177 |
| SY4207 | 266863993 | SY4207 | Taqman | SY4207A1FM | CCTATTGAAGCACATGT | 394 |
| SY4207 | 266863993 | SY4207 | Taqman | SY4207A2TT | ACCTATTGAAGCACTTGT | 395 |
| SY4278 | 270585230 | SY4278 | Taqman | | | |
| SY4278 | 270585230 | SY4278 | Taqman | SY4278F1 | AACCGGCCTCTCCTAAAGG | 178 |
| SY4278 | 270585230 | SY4278 | Taqman | SY4278R1 | TTGATGAAATATAAGTCGCTTGTTGATAG | 179 |
| SY4278 | 270585230 | SY4278 | Taqman | SY4278A1FM | TATTCAATCACTCATTG | 396 |
| SY4278 | 270585230 | SY4278 | Taqman | SY4278A2TT | TTATTCAATCACTTATTGT | 397 |
| SY4255 | 270585250 | SY4255 | Taqman | | | |
| SY4255 | 270585250 | SY4255 | Taqman | SY4255F1 | ATCTTTGAGATGCAACGTATTTGTA | 180 |
| SY4255 | 270585250 | SY4255 | Taqman | SY4255R1 | CAACGACCTAAATGATGTGCTATATCC | 181 |
| SY4255 | 270585250 | SY4255 | Taqman | SY4255A1FM | TTTTACGTATGCTAGC | 398 |
| SY4255 | 270585250 | SY4255 | Taqman | SY4255A2TT | TTTACGTTTGCTAGC | 399 |
| SY4300 | 270585251 | SY4300 | Taqman | | | |
| SY4300 | 270585251 | SY4300 | Taqman | SY4300F1 | GCAAGTATTCCTTGTACCCTTCATC | 182 |
| SY4300 | 270585251 | SY4300 | Taqman | SY4300R1 | TTGGTCTGAAAGTGTAAATATAGTCACG | 183 |
| SY4300 | 270585251 | SY4300 | Taqman | SY4300A1FM | TTGCTCTTAGCCAATA | 400 |
| SY4300 | 270585251 | SY4300 | Taqman | SY4300A2TT | TGCTCTTAGCCGATA | 401 |
| SY4301 | 270585256 | SY4301 | Taqman | | | |
| SY4301 | 270585256 | SY4301 | Taqman | SY4301F1 | GCTGCAATTCTCTTCCACCATT | 184 |
| SY4301 | 270585256 | SY4301 | Taqman | SY4301R1 | CGTGGTGTCATCTTGCGTAA | 185 |
| SY4301 | 270585256 | SY4301 | Taqman | SY4301A1FM | TCTATGAAAAGCTACGAACTT | 402 |
| SY4301 | 270585256 | SY4301 | Taqman | SY4301A2TT | CTCTATGAAAAGCTATGAACTTT | 403 |
| SY4244 | 270585257 | SY4244 | Taqman | | | |
| SY4244 | 270585257 | SY4244 | Taqman | SY4244F1 | AACAGAAGCCATTTGAAGATTTACCA | 186 |
| SY4244 | 270585257 | SY4244 | Taqman | SY4244R1 | GTGCATGATCTTCCTGCCAA | 187 |
| SY4244 | 270585257 | SY4244 | Taqman | SY4244A1FM | CATGATTAAAAGACGGTCTA | 404 |
| SY4244 | 270585257 | SY4244 | Taqman | SY4244A2TT | TTCATGATTAAAAGACTGTC | 405 |
| SY4295 | 270585267 | SY4295 | Taqman | | | |
| SY4295 | 270585267 | SY4295 | Taqman | SY4295F1 | GAAGGAATTCTCTCATCATGTGTTTAC | 188 |
| SY4295 | 270585267 | SY4295 | Taqman | SY4295R1 | TGAGCCAGTAGCATAACCTGAA | 189 |
| SY4295 | 270585267 | SY4295 | Taqman | SY4295A1FM | TGTTTTAACCAAGTAATACG | 406 |
| SY4295 | 270585267 | SY4295 | Taqman | SY4295A2TT | TTGTTTTAACCAAGTAGTAC | 407 |
| SY4254 | 270585272 | SY4254 | Taqman | | | |
| SY4254 | 270585272 | SY4254 | Taqman | SY4254F1 | GGCGAAAAGTGACCCTCTCT | 190 |
| SY4254 | 270585272 | SY4254 | Taqman | SY4254R1 | ACCAAGTTAAGTTGCCTCTTATGAC | 191 |
| SY4254 | 270585272 | SY4254 | Taqman | SY4254A1FM | TCATGTACACTCTTTGAGTA | 408 |
| SY4254 | 270585272 | SY4254 | Taqman | SY4254A2TT | TTCATGTACACTCTTGAGTAT | 409 |
| SY4302 | 270775294 | SY4302 | Taqman | | | |
| SY4302 | 270775294 | SY4302 | Taqman | SY4302F1 | GCGATGCGAGTGCTAAGTG | 192 |
| SY4302 | 270775294 | SY4302 | Taqman | SY4302R1 | GTGCATGTTGAACAAAGGTCTCTT | 193 |
| SY4302 | 270775294 | SY4302 | Taqman | SY4302A1FM | TAATTATTAACTCTTTCCTTTTG | 410 |
| SY4302 | 270775294 | SY4302 | Taqman | SY4302A2TT | ATTATTAACTCTTTCTTTTTGTCT | 411 |
| SY4253 | 270775313 | SY4253 | Taqman | | | |
| SY4253 | 270775313 | SY4253 | Taqman | SY4253F1 | CCCTAATCATCAAACCCAGCAAA | 194 |
| SY4253 | 270775313 | SY4253 | Taqman | SY4253R1 | AGCACATCATTTAGGTCGTTGAAAG | 195 |
| SY4253 | 270775313 | SY4253 | Taqman | SY4253A1FM | TCATCTATATAAACTTCGACTAA | 412 |
| SY4253 | 270775313 | SY4253 | Taqman | SY4253A2TT | CTCATCTATATAAACTTGGACTA | 413 |
| SY4247 | 270775314 | SY4247 | Taqman | | | |
| SY4247 | 270775314 | SY4247 | Taqman | SY4247F1 | TGCTGGGTTTGATGATTAGGGTAA | 196 |
| SY4247 | 270775314 | SY4247 | Taqman | SY4247R1 | GGAAGAAGATGAAGGGTACAAGGA | 197 |
| SY4247 | 270775314 | SY4247 | Taqman | SY4247A1FM | TGCCCCTAACACAAC | 414 |
| SY4247 | 270775314 | SY4247 | Taqman | SY4247A2TT | TGCCCCTTACACAAC | 415 |
| SY4257 | 270775316 | SY4257 | Taqman | | | |
| SY4257 | 270775316 | SY4257 | Taqman | SY4257F1 | GGTAGGTTCTAGCCCGATAGGA | 198 |
| SY4257 | 270775316 | SY4257 | Taqman | SY4257R1 | CGTGACTATATTTACACTTTCAGACCA | 199 |
| SY4257 | 270775316 | SY4257 | Taqman | SY4257A1FM | ATGGTGTTTTATCTAAGTTT | 416 |
| SY4257 | 270775316 | SY4257 | Taqman | SY4257A2TT | AAATGGTGTTTTATCTTTTAT | 417 |
| SY4281 | 270775330 | SY4281 | Taqman | | | |
| SY4281 | 270775330 | SY4281 | Taqman | SY4281F1 | AAACCACCCATGAAAGCCAGAA | 200 |
| SY4281 | 270775330 | SY4281 | Taqman | SY4281R1 | AAGAATAGCGAGTAAAGTGTGTGC | 201 |
| SY4281 | 270775330 | SY4281 | Taqman | SY4281A1FM | TGATAAGTGTCTCTGTTGTT | 418 |
| SY4281 | 270775330 | SY4281 | Taqman | SY4281A2TT | TGATAAGTGTCTGTGTTGTT | 419 |
| SY4284 | 270964571 | SY4284 | Taqman | | | |
| SY4284 | 270964571 | SY4284 | Taqman | SY4284F1 | AAGAGCCAAACTACCTGCGAAA | 202 |
| SY4284 | 270964571 | SY4284 | Taqman | SY4284R1 | ACGAGAACTGACAGGGTCTGAT | 203 |
| SY4284 | 270964571 | SY4284 | Taqman | SY4284A1FM | TTCTGAGTAGATTTATTATCA | 420 |
| SY4284 | 270964571 | SY4284 | Taqman | SY4284A2TT | TTCTGAGTAGATTTATTGTC | 421 |
| SY4261 | 270964573 | SY4261 | Taqman | | | |
| SY4261 | 270964573 | SY4261 | Taqman | SY4261F1 | AGGTGTTTGCTTCGTTGTGAAA | 204 |
| SY4261 | 270964573 | SY4261 | Taqman | SY4261R1 | CCAAAGTGCACCACCTTCCTT | 205 |
| SY4261 | 270964573 | SY4261 | Taqman | SY4261A1FM | CTTTCGATGAATGCTATGA | 422 |
| SY4261 | 270964573 | SY4261 | Taqman | SY4261A2TT | CTTTCGATGAATGTTATGATA | 423 |
| SY4305 | 270964584 | SY4305 | Taqman | | | |
| SY4305 | 270964584 | SY4305 | Taqman | SY4305F1 | TTGGTCTGAAAGTGTAAATATAGTCACG | 206 |
| SY4305 | 270964584 | SY4305 | Taqman | SY4305R1 | GCAAGTATTCCTTGTACCCTTCATC | 207 |
| SY4305 | 270964584 | SY4305 | Taqman | SY4305A1FM | CTCCTAAACGTAACTGT | 424 |
| SY4305 | 270964584 | SY4305 | Taqman | SY4305A2TT | CTCCTAAACGTAGCTG | 425 |
| SY4276 | 270964586 | SY4276 | Taqman | | | |
| SY4276 | 270964586 | SY4276 | Taqman | SY4276F1 | CTCTTATGTTTAATCGATGTGGTCTCAATC | 208 |
| SY4276 | 270964586 | SY4276 | Taqman | SY4276R1 | AGTGGCCCTTATGCACTATTTTC | 209 |
| SY4276 | 270964586 | SY4276 | Taqman | SY4276A1FM | CCAACTACATCATCATGT | 426 |
| SY4276 | 270964586 | SY4276 | Taqman | SY4276A2TT | TTCCAACTACATCATGTG | 427 |
| SY4299 | 270964590 | SY4299 | Taqman | | | |
| SY4299 | 270964590 | SY4299 | Taqman | SY4299F1 | AGTGGTATGAAGTGGAAGTGTCTTG | 210 |
| SY4299 | 270964590 | SY4299 | Taqman | SY4299R1 | GGCCCGTGGTGTCATCTTG | 211 |
| SY4299 | 270964590 | SY4299 | Taqman | SY4299A1FM | TCAGCTCTGAGGATGC | 428 |
| SY4299 | 270964590 | SY4299 | Taqman | SY4299A2TT | AACAATAGTCTTCAGAGGATGC | 429 |
| SY4291 | 270964591 | SY4291 | Taqman | | | |
| SY4291 | 270964591 | SY4291 | Taqman | SY4291F1 | ACTCAGCAGCATTCTGTTAGAAGGA | 212 |
| SY4291 | 270964591 | SY4291 | Taqman | SY4291R1 | ACTCTTACCTGATAGAGGACTGAAG | 213 |
| SY4291 | 270964591 | SY4291 | Taqman | SY4291A1FM | ATTAGCATATTTCTCTCCATT | 430 |
| SY4291 | 270964591 | SY4291 | Taqman | SY4291A2TT | TATTAGCATATTTGTCTCCAT | 431 |
| SY4303 | 270964599 | SY4303 | Taqman | | | |
| SY4303 | 270964599 | SY4303 | Taqman | SY4303F1 | GGCTCCACTGCCATTACCATT | 214 |
| SY4303 | 270964599 | SY4303 | Taqman | SY4303R1 | TGAGCCAGTAGCATAACCTGAA | 215 |
| SY4303 | 270964599 | SY4303 | Taqman | SY4303A1FM | TCTCTATGGCCGTA | 432 |
| SY4303 | 270964599 | SY4303 | Taqman | SY4303A2TT | CTCTCTATGGTCGTA | 433 |
| SY4273 | 270964601 | SY4273 | Taqman | | | |
| SY4273 | 270964601 | SY4273 | Taqman | SY4273F1 | TTTCTTTTGGGACGAAGGGTTT | 216 |
| SY4273 | 270964601 | SY4273 | Taqman | SY4273R1 | AGAGTAGTGACAGAGTTGAGCAA | 217 |
| SY4273 | 270964601 | SY4273 | Taqman | SY4273A1FM | CTACAATAATACAAAATCTCAATA | 434 |
| SY4273 | 270964601 | SY4273 | Taqman | SY4273A2TT | CTACAATAATACAAAATTTCAATA | 435 |
| SY4256 | 270964605 | SY4256 | Taqman | | | |
| SY4256 | 270964605 | SY4256 | Taqman | SY4256F1 | TGCAACAGAGCTGAAAACTTGTC | 218 |
| SY4256 | 270964605 | SY4256 | Taqman | SY4256R1 | ACACAGTTGCCGCTTATGAC | 219 |
| SY4256 | 270964605 | SY4256 | Taqman | SY4256A1FM | CCCTCTATTTATATATGTGCA | 436 |
| SY4256 | 270964605 | SY4256 | Taqman | SY4256A2TT | CCTCTATTTATATTTGTGCAC | 437 |
| SY4289 | 271154434 | SY4289 | Taqman | | | |
| SY4289 | 271154434 | SY4289 | Taqman | SY4289F1 | AGTGCATAAGGGCCACTAATTTC | 220 |
| SY4289 | 271154434 | SY4289 | Taqman | SY4289R1 | CTATTTTGTTTGTTTGCACCTACCA | 221 |
| SY4289 | 271154434 | SY4289 | Taqman | SY4289A1FM | TGGCACATAGCAATTTTTAA | 438 |
| SY4289 | 271154434 | SY4289 | Taqman | SY4289A2TT | TATGGCACATAGCAATTTAAA | 439 |
| SY4285 | 271154435 | SY4285 | Taqman | | | |
| SY4285 | 271154435 | SY4285 | Taqman | SY4285F1 | AAATCCAAATCTCTTGTTATTCAAACACTA | 222 |
| SY4285 | 271154435 | SY4285 | Taqman | SY4285R1 | CACCTACCAAGTATGGCACATAGC | 223 |
| SY4285 | 271154435 | SY4285 | Taqman | SY4285A1FM | TCAAAGATGTACTCAAGCT | 440 |
| SY4285 | 271154435 | SY4285 | Taqman | SY4285A2TT | CAAAGATGTACTCGAGCT | 441 |
| SY4306 | 271154438 | SY4306 | Taqman | | | |
| SY4306 | 271154438 | SY4306 | Taqman | SY4306F1 | GCCACTCACACATATACTTGCACTT | 224 |
| SY4306 | 271154438 | SY4306 | Taqman | SY4306R1 | TGATGGAAGCAAGACGGAGAGAT | 225 |
| SY4306 | 271154438 | SY4306 | Taqman | SY4306A1FM | ACCATGTTGCAATTGATA | 442 |
| SY4306 | 271154438 | SY4306 | Taqman | SY4306A2TT | CCATGTTGCAATTGGTA | 443 |
| SY4282 | 271154440 | SY4282 | Taqman | | | |
| SY4282 | 271154440 | SY4282 | Taqman | SY4282F1 | GGGACTTAATGGAGCCCTATTCTC | 226 |
| SY4282 | 271154440 | SY4282 | Taqman | SY4282R1 | TGGCAGGAAGATCATGCACTTA | 227 |
| SY4282 | 271154440 | SY4282 | Taqman | SY4282A1FM | TCATGCTAGTGAAACAGCT | 444 |
| SY4282 | 271154440 | SY4282 | Taqman | SY4282A2TT | CATGCTAGTGGAACAGCT | 445 |
| SY4268 | 271154450 | SY4268 | Taqman | | | |
| SY4268 | 271154450 | SY4268 | Taqman | SY4268F1 | AACAACTACGTTTTCTCTTCACTTCAG | 228 |
| SY4268 | 271154450 | SY4268 | Taqman | SY4268R1 | CCTGGGTGGAAACCTCTCAA | 229 |
| SY4268 | 271154450 | SY4268 | Taqman | SY4268A1FM | AAATGGTCGACTTCAAAA | 446 |
| SY4268 | 271154450 | SY4268 | Taqman | SY4268A2TT | TGGTCGACTTCAGAA | 447 |
| SY4269 | 271154453 | SY4269 | Taqman | | | |
| SY4269 | 271154453 | SY4269 | Taqman | SY4269F1 | TGTAACGTATTCGGTTTTATAGGGTGA | 230 |
| SY4269 | 271154453 | SY4269 | Taqman | SY4269R1 | AACAAACATACGAATTTAACGCGACAT | 231 |
| SY4269 | 271154453 | SY4269 | Taqman | SY4269A1FM | AATCATTTTTGTAATAGT | 448 |
| SY4269 | 271154453 | SY4269 | Taqman | SY4269A2TT | AATCATTTTTGTGATAG | 449 |
| SY4272 | 271154454 | SY4272 | Taqman | | | |
| SY4272 | 271154454 | SY4272 | Taqman | SY4272F1 | AGAGGGAATTGCAACAGAGCTGA | 232 |
| SY4272 | 271154454 | SY4272 | Taqman | SY4272R1 | TGCCGCTTATGACTTATCCTTTC | 233 |
| SY4272 | 271154454 | SY4272 | Taqman | SY4272A1FM | TTGTCAAGACACTAATACTT | 450 |
| SY4272 | 271154454 | SY4272 | Taqman | SY4272A2TT | CAAGACACTACTACTTGGT | 451 |
| SY4250 | 271344625 | SY4250 | Taqman | | | |
| SY4250 | 271344625 | SY4250 | Taqman | SY4250F1 | ATTGGTGTTGGCATGGTTCAC | 234 |
| SY4250 | 271344625 | SY4250 | Taqman | SY4250R1 | TAAACAAAGACGCCTCCTGCTA | 235 |
| SY4250 | 271344625 | SY4250 | Taqman | SY4250A1FM | AACAGTGTTTTCTCTTAACAAT | 452 |
| SY4250 | 271344625 | SY4250 | Taqman | SY4250A2TT | ACAGTGTTTTCTCTTGACAATT | 453 |
| SY4307 | 271344641 | SY4307 | Taqman | | | |
| SY4307 | 271344641 | SY4307 | Taqman | SY4307F1 | CCCATAATACAACCCAGAAATGGAA | 236 |
| SY4307 | 271344641 | SY4307 | Taqman | SY4307R1 | GTTTACGTACTATGCATGACCACA | 237 |
| SY4307 | 271344641 | SY4307 | Taqman | SY4307A1FM | ATATGGGATTTCACCGTTATC | 454 |
| SY4307 | 271344641 | SY4307 | Taqman | SY4307A2TT | AATATGGGATTTCATCGTTATC | 455 |
| SY4265 | 271344646 | SY4265 | Taqman | | | |
| SY4265 | 271344646 | SY4265 | Taqman | SY4265F1 | TTCGAAGTTCAGTTGGCACAA | 238 |
| SY4265 | 271344646 | SY4265 | Taqman | SY4265R1 | AGGGCCAAGCTTAGACAAGGTAA | 239 |
| SY4265 | 271344646 | SY4265 | Taqman | SY4265A1FM | AACACAACCGCTTGTAC | 456 |
| SY4265 | 271344646 | SY4265 | Taqman | SY4265A2TT | AACACAACCTCTTGTACA | 457 |
| SY4297 | 271534944 | SY4297 | Taqman | | | |
| SY4297 | 271534944 | SY4297 | Taqman | SY4297F1 | ATGCAGCAGTATGCAATCCAA | 240 |
| SY4297 | 271534944 | SY4297 | Taqman | SY4297R1 | TTCACTTTACATTTCTACTCCAACAATA | 241 |
| SY4297 | 271534944 | SY4297 | Taqman | SY4297A1FM | TTGTTATACTTGGCGTT | 458 |
| SY4297 | 271534944 | SY4297 | Taqman | SY4297A2TT | TTATACTTGGTGTTGGC | 459 |
| SY4279 | 271534965 | SY4279 | Taqman | | | |
| SY4279 | 271534965 | SY4279 | Taqman | SY4279F1 | GGAGAGAAATGACTCACATAGCATAGG | 242 |
| SY4279 | 271534965 | SY4279 | Taqman | SY4279R1 | TGAGACCACATCGATTAAACATAAGAGA | 243 |
| SY4279 | 271534965 | SY4279 | Taqman | SY4279A1FM | AAGGAAATGGAGTATTGATAAA | 460 |
| SY4279 | 271534965 | SY4279 | Taqman | SY4279A2TT | AGGAAATGGAGTATTGATGAA | 461 |
| SY4251 | 271534967 | SY4251 | Taqman | | | |
| SY4251 | 271534967 | SY4251 | Taqman | SY4251F1 | AAGGCCCGTGGTGTCATCTTG | 244 |
| SY4251 | 271534967 | SY4251 | Taqman | SY4251R1 | TGGTATGAAGTGGAAGTGTCTTGA | 245 |
| SY4251 | 271534967 | SY4251 | Taqman | SY4251A1FM | CACCATTTCCCAAACAA | 462 |
| SY4251 | 271534967 | SY4251 | Taqman | SY4251A2TT | TCCACCATTTTCCAAAC | 463 |
| SY4249 | 271534977 | SY4249 | Taqman | | | |
| SY4249 | 271534977 | SY4249 | Taqman | SY4249F1 | ACTGGCTCAACGTGACTCTTA | 246 |
| SY4249 | 271534977 | SY4249 | Taqman | SY4249R1 | TGAACAAAATGTTAGATGGAATGACA | 247 |
| SY4249 | 271534977 | SY4249 | Taqman | SY4249A1FM | TAGAGATACTACTACTACATA | 464 |
| SY4249 | 271534977 | SY4249 | Taqman | SY4249A2TT | AGAGATACTACTACTACTTAA | 465 |
| SY4310 | 271724460 | SY4310 | Taqman | | | |
| SY4310 | 271724460 | SY4310 | Taqman | SY4310F1 | GGGCATGTGCTCTTAATTTCTGA | 248 |
| SY4310 | 271724460 | SY4310 | Taqman | SY4310R1 | GTGAACCATGCCAACACCAA | 249 |
| SY4310 | 271724460 | SY4310 | Taqman | SY4310A1FM | CAAGCATCTAACTGCAA | 466 |
| SY4310 | 271724460 | SY4310 | Taqman | SY4310A2TT | CACAAGCATCTAACTGTAA | 467 |
| SY4292 | 271724476 | SY4292 | Taqman | | | |
| SY4292 | 271724476 | SY4292 | Taqman | SY4292F1 | GGAAGCAAGACGGAGAGATAAGATTG | 250 |
| SY4292 | 271724476 | SY4292 | Taqman | SY4292R1 | GCCACTCACACATATACTTGCACTT | 251 |
| SY4292 | 271724476 | SY4292 | Taqman | SY4292A1FM | CATGGTATCATGTAGTAGT | 468 |
| SY4292 | 271724476 | SY4292 | Taqman | SY4292A2TT | CATGGTATCATGTGGTA | 469 |
| SY4290 | 271914417 | SY4290 | Taqman | | | |
| SY4290 | 271914417 | SY4290 | Taqman | SY4290F1 | CCAGACGCAACTTGTGCAAT | 252 |
| SY4290 | 271914417 | SY4290 | Taqman | SY4290R1 | GTTGGCATGGTTCACCTAACAG | 253 |
| SY4290 | 271914417 | SY4290 | Taqman | SY4290A1FM | CAGCAAACACACCATAAAC | 470 |
| SY4290 | 271914417 | SY4290 | Taqman | SY4290A2TT | AGCAAACACACCGTAAACA | 471 |
| SY4252 | 271914434 | SY4252 | Taqman | | | |
| SY4252 | 271914434 | SY4252 | Taqman | SY4252F1 | ATGTGGTCATGCATAGTACGTAAAC | 254 |
| SY4252 | 271914434 | SY4252 | Taqman | SY4252R1 | CAATGCAAGGACTGCAAGGT | 255 |
| SY4252 | 271914434 | SY4252 | Taqman | SY4252A1FM | TAAGGTAAGACTACGATGT | 472 |
| SY4252 | 271914434 | SY4252 | Taqman | SY4252A2TT | TTATAAGGTAAGACTATGATG | 473 |
| SY4246 | 271914435 | SY4246 | Taqman | | | |
| SY4246 | 271914435 | SY4246 | Taqman | SY4246F1 | GGAGAGAAATGACTCACATAGCATAGG | 256 |
| SY4246 | 271914435 | SY4246 | Taqman | SY4246R1 | TGAGACCACATCGATTAAACATAAGAGA | 257 |
| SY4246 | 271914435 | SY4246 | Taqman | SY4246A1FM | CCTTAATTACTACACCAA | 474 |
| SY4246 | 271914435 | SY4246 | Taqman | SY4246A2TT | TTCCTTAATTACTATACCA | 475 |
| SY4314 | 271914437 | SY4314 | Taqman | | | |
| SY4314 | 271914437 | SY4314 | Taqman | SY4314F1 | GCCACTCACACATATACTTGCACTT | 258 |
| SY4314 | 271914437 | SY4314 | Taqman | SY4314R1 | TGATGGAAGCAAGACGGAGAGAT | 259 |
| SY4314 | 271914437 | SY4314 | Taqman | SY4314A1FM | ACGTCACTTCAAACCA | 476 |
| SY4314 | 271914437 | SY4314 | Taqman | SY4314A2TT | ACGTCACTTCACACC | 477 |
| SY4264 | 271914440 | SY4264 | Taqman | | | |
| SY4264 | 271914440 | SY4264 | Taqman | SY4264F1 | GAGGAAAGTAAATTCTGCTGCCAAA | 260 |
| SY4264 | 271914440 | SY4264 | Taqman | SY4264R1 | GATTGTGATGGTCCTAGCTAAAAGT | 261 |
| SY4264 | 271914440 | SY4264 | Taqman | SY4264A1FM | TTGTTAGGAATGCTTTTGAAAT | 478 |
| SY4264 | 271914440 | SY4264 | Taqman | SY4264A2TT | TTGTTAGGAATGCTTTGAAATT | 479 |
| SY4416 | 272389082 | SY4416 | Taqman | | | |
| SY4416 | 272389082 | SY4416 | Taqman | SY4416F1 | GCAAAGGCTATTGAGCCAAAGAC | 262 |
| SY4416 | 272389082 | SY4416 | Taqman | SY4416R1 | GCCTAGAAGTGGAGGCTTGAAT | 263 |
| SY4416 | 272389082 | SY4416 | Taqman | SY4416A1FM | CTGTTGGAGTAAGAGCCAA | 480 |
| SY4416 | 272389082 | SY4416 | Taqman | SY4416A2TT | TGTTGGAGTAGGAGCCA | 481 |
| SY4426 | 353462473 | SY4426 | Taqman | | | |
| SY4426 | 353462473 | SY4426 | Taqman | SY4426F1 | ATCTTGGAGGCGGTGCTCT | 264 |
| SY4426 | 353462473 | SY4426 | Taqman | SY4426R1 | TGGAGGAAGCTATGAGAAGTGTTG | 265 |
| SY4426 | 353462473 | SY4426 | Taqman | SY4426A1FM | TGGAGATCATAGGCTGTC | 482 |
| SY4426 | 353462473 | SY4426 | Taqman | SY4426A2TT | ATGGAGATCATTGGCTGTCT | 483 |
| SY4427 | 412802301 | SY4427 | Taqman | | | |
| SY4427 | 412802301 | SY4427 | Taqman | SY4427F1 | GGCAGTTCTAAATGCAGCATCA | 266 |
| SY4427 | 412802301 | SY4427 | Taqman | SY4427R1 | GCAGCATGAGCCAAAGCAATG | 267 |
| SY4427 | 412802301 | SY4427 | Taqman | SY4427A1FM | AATTTCCATTCAAGTTTAAA | 484 |
| SY4427 | 412802301 | SY4427 | Taqman | SY4427A2TT | AATTTCCATTCAAGTTTTAA | 485 |
| SY4421 | 412802302 | SY4421 | Taqman | | | |
| SY4421 | 412802302 | SY4421 | Taqman | SY4421F1 | GCAGCTGGGAGAATGTTATTGTATG | 268 |
| SY4421 | 412802302 | SY4421 | Taqman | SY4421R1 | TTCTGCAATTCCTAGGTGTTCA | 269 |
| SY4421 | 412802302 | SY4421 | Taqman | SY4421A1FM | AAGTCCCATAAGTTAGCA | 486 |
| SY4421 | 412802302 | SY4421 | Taqman | SY4421A2TT | AAAGTCCCATAATTTAGCA | 487 |
| SY4437 | 412802304 | SY4437 | Taqman | | | |
| SY4437 | 412802304 | SY4437 | Taqman | SY4437F1 | ATTCATCAATGGCGGCTGCAAA | 270 |
| SY4437 | 412802304 | SY4437 | Taqman | SY4437R1 | AAGATTCTTCATTCTACGTGGCTCT | 271 |
| SY4437 | 412802304 | SY4437 | Taqman | SY4437A1FM | TCTTTCTGTTACACTATTT | 488 |
| SY4437 | 412802304 | SY4437 | Taqman | SY4437A2TT | TTCTTTCTGTTACATTATTT | 489 |
| SY4428 | 412802305 | SY4428 | Taqman | | | |
| SY4428 | 412802305 | SY4428 | Taqman | SY4428F1 | ATTGCTGCTGCACCGGTTGAT | 272 |
| SY4428 | 412802305 | SY4428 | Taqman | SY4428R1 | GTCATCCTCTGCTGCTAATCCA | 273 |
| SY4428 | 412302305 | SY4428 | Taqman | SY4428A1FM | CATCATCATTAATCCAATTGAATA | 490 |
| SY4428 | 412802305 | SY4428 | Taqman | SY4428A2TT | CATCATCATTAATCCGATTGAAT | 491 |
| SY4362 | 999991351 | SY4362 | Taqman | | | |
| SY4362 | 999991351 | SY4362 | Taqman | SY4362F1 | TCATTCTTTGTTGAAAATACTTGATT | 274 |
| SY4362 | 999991351 | SY4362 | Taqman | SY4362R1 | TTGATATTGATATGATGGGTTGAA | 275 |
| SY4362 | 999991351 | SY4362 | Taqman | SY4362A1FM | CAATCTTATTAAATAAGTGCA | 492 |
| SY4362 | 999991351 | SY4362 | Taqman | SY4362A2TT | GTATGACCTAGATAGGAACCT | 493 |
| SY0574AQ | 23543129 | SY0574AQ | Taqman | | | |
| SY0574AQ | 23543129 | SY0574AQ | Taqman | SY0574AF1 | GCGAGGAGGTCGTAGATGAGA | 276 |
| SY0574AQ | 23543129 | SY0574AQ | Taqman | SY0574AR1 | TGAAGGGTAGTTCCGACAAAGAAAC | 277 |
| SY0574AQ | 23543129 | SY0574AQ | Taqman | SY0574AA1FM | TGTCGTTTGACAAGGC | 494 |
| SY0574AQ | 23543129 | SY0574AQ | Taqman | SY0574AA2TT | TCGTTTGACGAGGCT | 495 |

TABLE 20
SNP target sequences

| Table 20. | Assay component | | Allele/Detected | | |
|---|---|---|---|---|---|
| Marker Name | name | DNA sequence | nucleotide | TOP target sequence | SEQ ID NO. |
| IGGY260 | | | | AACCCTCTAACTATACTTATTCTCTGACAACCGTTTATAAAGTTTATCTAAACAGGACTTTACTTAGTTCCA | 496 |
| | | | | CCATTCAAAAAAACATGATTTTGTAGCTTATGCATAAGTTCACTTCAACTTATGGAGGAACTTCTTTCATC | |
| | | | | TCTCTTCTTATTTTCTTCTCATATAAGTACTCAGGGAAAAGTTTATTCAAACAGACCCTAAACCTTGATTTT | |
| | | | | ACTCTCAAACATATTTTTGGAACACTCCCATCGAAAATCCAGACACACCCTTAATTTCCCAGCATTCAAAA | |
| | | | | CCCTCTTTTAGGGTTCCATTCACAGAGCAAACACGTTCCAAACAAAAGAAGACCAAAGATTTCGGCACTC | |
| | | | | AGAGSGGAAAAGYTTYGAACTTTGACACTCCCAAGGAGTCACTYAGAAGGGTTTGTTTCGTGGGGAGTT | |
| | | | | TTGGCGACGATGGAGAGGGCGTGGAGGCCGCTCTGGAGCTCGTCGGCGAGGAGGTCGTAGATGAGAC | |
| | | | | GGTGTCGTTTGAC[A/G]AGGCTCTGGCCCTCGAACTTGGGGGAGACGATGTTGAGGTTGAAGTGGGTT | |
| | | | | TCTTTGTCGGAACTACCCTTCACGGCGGCGTGGCCCGCGTGCTGGTACGACACGTCGTCCACCTCCAAAA | |
| | | | | CGGTGGCTTCCAGCGCCGTTTGCAGCTTCGACCGAATCCTGCTAGGCACGAGTAAATACATGAATATGT | |
| | | | | CTCTGAACTTTTTGAGCATTTTTAATRGTAATTAAGTCCTTAATCTTCAACAAATTTTTTAAACAAATTTCT | |
| | | | | CTAAGTTAGTTTACTACAGCTTGAAACTGCCATAAAAATAACAATATGTGGCWGTTTTACCAACTCCAAG | |
| | | | | ACCCAATTACAAAAATTGTAAGAGATCTAAGAACCCAATTACAATTTATTTTTAATTTTTTTAGAAACTTC | |
| | | | | ATTAAAAATTCCCAAATAATTCAATCACCTATTGATGTATTAACCCTCTAACTTATATTATTCTCTTACAAC | |
| | | | | CGTTTATAAAGTTTATCTAAACAGGACTTTACTTAGTTCCACCATTCAAAAAAACATGATTTTGTAGCTTA | |
| | | | | TGCATAAGTTCACTTCAACTTAT | |
| IGGY260 | IGGY260F3 | TCAAACG | | | 639 |
| | | ACACCGT | | | |
| | | CTCAT | | | |
| IGGY260 | IGGY260F1 | ACTTCGT | A | | 640 |
| | | CAGTAAC | | | |
| | | GGACGCA | | | |
| | | AGTTCGA | | | |
| | | GGGCCAG | | | |
| | | AGCCTT | | | |
| IGGY260 | IGGY260F2 | GAGTCGA | G | | 641 |
| | | GGTCATA | | | |
| | | TCGTGCA | | | |
| | | AGTTCGA | | | |
| | | GGGCCAG | | | |
| | | AGCCTC | | | |
| SY0574AQ | | | | AACCCTCTAACTATACTTATTCTCTGACAACCGTTTATAAAGTTTATCTAAACAGGACTTTACTTAGTTCCA | 497 |
| | | | | CCATTCAAAAAAACATGATTTTGTAGCTTATGCATAAGTTCACTTCAACTTATGGAGGAACTTCTTTCATC | |
| | | | | TCTCTTCTTATTTTCTTCTCATATAAGTACTCAGGGAAAAGTTTATTCAAACAGACCCTAAACCTTGATTTT | |
| | | | | ACTCTCAAACATATTTTTGGAACACTCCCATCGAAAATCCAGACACACCCTTAATTTCCCAGCATTCAAAA | |
| | | | | CCCTCTTTTAGGGTTCCATTCACAGAGCAAACACGTTCCAAACAAAAGAAGACCAAAGATTTCGGCACTC | |
| | | | | AGAGNGGAAAAGNTTNGAACTTTGACACTCCCAAGGAGTCACTNAGAAGGGTTTGTTTCGTGGGGAGT | |
| | | | | TTTGGCGACGATGGAGAGGGCGTGGAGGCCGCTCTGGAGCTCGTCGGCGAGGAGGTCGTAGATGAGA | |
| | | | | CGGTGTCGTTTGAC[A/G]AGGCTCTGGCCCTCGAACTTGGGGGAGACGATGTTGAGGTTGAAGTGGGT | |
| | | | | TTCTTTGTCGGAACTACCCTTCACGGCGGCGTGGCCCGCGTGCTGGTACGACACGTCGTCCACCTCCAAA | |
| | | | | ACGGTGGCTTCCAGCGCCGTTTGCAGCTTCGACCGAATCCTGCTAGGCACGAGTAAATACATGAATATG | |
| | | | | TCTCTGAACTTTTTGAGCATTTTTAATNGTAATTAAGTCCTTAATCTTCAACAAATTTTTTAAACAAATTTC | |
| | | | | TCTAAGTTAGTTTACTACAGCTTGAAACTGCCATAAAAATAACAATATGTGGCNGTTTTACCAACTCCAA | |
| | | | | GACCCAATTACAAAAATTGTAAGAGATCTAAGAACCCAATTACAATTTATTTTTAATTTTTTTAGAAACTT | |
| | | | | CATTAAAAATTCCCAAATAATTCAATCACCTATTGATGTATTAACCCTCTAACTTATATTATTCTCTTACAA | |
| | | | | CCGTTTATAAAGTTTATCTAAACAGGACTTTACTTAGTTCCACCATTCAAAAAAACATGATTTTGTAGCTT | |
| | | | | ATGCATAAGTTCACTTCAACTTAT | |
| SY0574AQ | SY0574AF1 | GCGAGGA | | | 642 |
| | | GGTCGTA | | | |
| | | GATGAGA | | | |
| SY0574AQ | SY0574AR1 | TGAAGGG | | | 643 |
| | | TAGTTCC | | | |
| | | GACAAAG | | | |
| | | AAAC | | | |
| SY0574AQ | SY0574AA1FM | TGTCGTTT | A | | 644 |
| | | GACAAGGC | | | |
| SY0574AQ | SY0574AA2TT | TCGTTTG | G | | 645 |
| | | ACGAGGCT | | | |
| SY0573AQ | | | | TTGCAGTTCTATTCTGGCTATCTTGTATAATTTGGGCCA[A/G]ACAAGTGGTGCCAAGCCGATAGGTTAA | 498 |
| | | | | GTTGGGCAGTTGACTAAAAGTCATAAAAACTGTAACATTTCAAAAATCCACAAAATTACCTCAACTAATT | |
| | | | | CTAGATCAAAAATANTCCACAATCTGTAATATTGCTAACAAGATTTTCAGCGCTCAAGTTCACTAGAATG | |
| | | | | CTATCATTTCCCGCAGAGAAAACAGTCTTTGTTTTTTTGGAGTTACCACCTGTTTTTAGGGGGTTTCACTT | |
| | | | | TATAAATACG | |
| SY0573AQ | SY0573AF1 | AGTCAAC | | | 646 |
| | | TGCCCAA | | | |
| | | CTTAACCTA | | | |
| SY0573AQ | SY0573AR1 | TGCAGTT | | | 647 |
| | | CTATTCTG | | | |
| | | GCTATCTT | | | |
| | | GT | | | |
| SY0573AQ | SY0573AA1FM | ACCACTT | G | | 648 |
| | | GTCTGGCC | | | |
| SY0573AQ | SY0573AA2TT | CACCACT | A | | 649 |
| | | TGTTTGGC | | | |
| IGGY741 | | | | GCAGCCCTTTCTACCATCAATTCATATTGAGAGCAAGTGCTGCTAAGGCTCTTGGATCATTCAGGAGCAA | 499 |
| | | | | CCCCACTATTTGAGTCAATTTCCTCTTCATGGGGGGTTAGTGGAAATGGAAAAAAAAAGATAATTGGAG | |
| | | | | GCAAAAAAAGTTGATATTGCAACAATAATAATAATAATATGGAACTGTTTGTGCTTTGATCCTCTGCAGA | |
| | | | | T[A/T]GAAGGTTCTTTCAAGAAAAGGAAGCCTTTGGTAAATAGTAAAGACCCTTTAGTACTTCGAAGCAC | |
| | | | | TTTCCTTTGTATTTCCTTGTTAGAATTGATGAGCTTTTTTTTKATATATTGGAAGTAAAATCTATTAGATAT | |
| | | | | CTTGTTTTAATATTTTGTGATATGTAATAAGTCGACTTGTTGGTGACCTAAGTGTG | |
| IGGY741 | IGGY741F3 | AAGGTTC | | | 650 |
| | | TTTCAAG | | | |
| | | AAAAGGAA | | | |
| IGGY741 | IGGY741F1 | ACTTCGT | A | | 651 |
| | | CAGTAAC | | | |
| | | GGACTTT | | | |
| | | GTGCTTT | | | |
| | | GATCCTC | | | |
| | | TGCAGATA | | | |
| IGGY741 | IGGY741F2 | GAGTCGA | T | | 652 |
| | | GGTCATA | | | |
| | | TCGTTTTG | | | |
| | | TGCTTTG | | | |
| | | ATCCTCT | | | |
| | | GCAGATT | | | |
| SY0089B | | | | CACACTTAGGTCACCAACAAGTCGACTTATTACATATCACAAAATATTAAAACAAGATATCTAATAGATTT | 500 |
| | | | | TACTTCCAATATAT[A/C]AAAAAAAAGCTCATCAATTCTAACAAGGAAATACAAAGGAAAGTGCTTCGAA | |
| | | | | GTACTAAAGGGTCTTTACTATTTACCAAAGGCTTCCTTTTCTTGAAAGAACCTTCNATCTGCAGAGGATC | |
| | | | | AAAGCACAAACAGTTCCATATTATTATTATTATTGTTGCAATATCAACTTTTTTTGCCTCCAATTATCTTTTT | |
| | | | | TTTTCCATTTCCACTAACCCCCCATGAAGAGGAAATTGACTCAAATAGTGGGGTTGCTCCTGAATGATCC | |
| | | | | AAGAGCCTTAGCAGCACTTGCTCTCAATATGAATTGATGGTAGAAAGGGCTGC | |
| SY0089B | SY0089BF1 | TCGAAGC | | | 653 |
| | | ACTTTCCT | | | |
| | | TTGTATTT | | | |
| | | CCT | | | |
| SY0089B | SY0089BR1 | CACTTAG | | | 654 |
| | | GTCACCA | | | |
| | | ACAAGTC | | | |
| | | GA | | | |
| SY0089B | SY0089BA1FM | CTTCCAAT | A | | 655 |
| | | ATATAAA | | | |
| | | AAAAA | | | |
| SY0089B | SY0089BA2VC | TTCCAAT | C | | 656 |
| | | ATATCAA | | | |
| | | AAAAA | | | |
| SY0098BQ | | | | GGAATTCCCAAATAGTCGATGCAAGAAGAAAGTCTCAAAAGTATGAATGTTGTAAAG[A/G]GCAAGGG | 501 |
| | | | | TAACGATTTTCNGNAATCCTTTCTTTACAAGACATGCTGACATGAAAGTAAAAGATTCAACATATGAATC | |
| | | | | GACTAACTATTTCCAACAAGGAATTAAGCCATTGTTGTATATTTGACATATAGATAGGAAAATGGCTATG | |
| | | | | GTCCTCCAAGTACTGCATTCTCAATGTCTTCTCTGCTTAAAGCATAACTAAACCTCCTCTCCATATTTTTTT | |
| | | | | CAAGATTCCCAGGTCCACTCTTCAAATAC | |
| SY0098BQ | SY0098BF1 | AGTCGAT | | | 657 |
| | | GCAAGAA | | | |
| | | GAAAGTC | | | |
| | | TCAAA | | | |
| SY0098BQ | SY0098BR1 | CTTTTACT | | | 658 |
| | | TTCATGTC | | | |
| | | AGCATGT | | | |
| | | CTTGT | | | |
| SY0098BQ | SY0098BA1FM | CCCTTGC | G | | 659 |
| | | CCTTTAC | | | |
| SY0098BQ | SY0098BA2TT | TTACCCTT | A | | 660 |
| | | GCTCTTTAC | | | |
| SY0567AQ | | | | GGAATTCCCAAATAGTCGATGCAAGAAGAAAGTCTCAAAAGTATGAATGTTGTAAAGNGCAAGGGTAA | 502 |
| | | | | CGATTTTC[A/T]GNAATCCTTTCTTTACAAGACATGCTGACATGAAAGTAAAAGATTCAACATATGAATC | |
| | | | | GACTAACTATTTCCAACAAGGAATTAAGCCATTGTTGTATATTTGACATATAGATAGGAAAATGGCTATG | |
| | | | | GTCCTCCAAGTACTGCATTCTCAATGTCTTCTCTGCTTAAAGCATAACTAAACCTCCTCTCCATATTTTTTT | |
| | | | | CAAGATTCCCAGGTCCACTCTTCAAATAC | |
| SY0567AQ | SY0567AF1 | GTCGATG | | | 661 |
| | | CAAGAAG | | | |
| | | AAAGTCT | | | |
| | | CAA | | | |
| SY0567AQ | SY0567AR1 | GTCAGCA | | | 662 |
| | | TGTCTTGT | | | |
| | | AAAGAAA | | | |
| | | GGA | | | |
| SY0567AQ | SY0567AA1FM | CAAGGGT | A | | 663 |
| | | AACGATT | | | |
| | | TTCAG | | | |
| SY0567AQ | SY0567AA2TT | CAAGGGT | T | | 664 |
| | | AACGATT | | | |
| | | TTCTG | | | |
| IGGY2850 | | | | ATGTAAAGCTGCCTTGANGGNCAATTCTCTGCTGCTAATTGCATAAGACATGGATGAAACACATAAAAT | 503 |
| | | | | AGTGGAAACAAATACTGTAAGAAGTGAAAACAACCACAACGACGATCTTGAAAGTTGTTTCAACTGAAG | |
| | | | | ACTTACACTTAAGCCAACTAAGAACCATCTGAATCCATGAAAAAGTTCTAGCACCCACCCATTAAGTGGA | |
| | | | | AAAAGAGTGTAGCTCTTCCTTATGTTCTCTAAAACCCAAATG[C/G]CTAAGCACAAATGCAACAACCCCA | |
| | | | | GAGAGCCATTGGTAACGGCAGAAATTAGCTGCAAGTTTGAATATCTTTCCACGCAAAACTGACCACGAA | |
| | | | | ATGGTCTGAACAAAGACTTCTGGATCAAAATGAATCCCAACATGACCAGTAGTAGCACATCAACGCAAA | |
| | | | | TGATCAAGAACTGGTTAATGCATGTAGAAGGATCTTTCAAAAACTTTAAATCATGGCAAAAAGTCTTTCC | |
| | | | | CCGGGTCCCAGGACAATC | |
| IGGY2850 | IGGY2850F3 | ATTTGGG | | | 665 |
| | | TTTTAGA | | | |
| | | GAACATA | | | |
| | | AGG | | | |
| IGGY2850 | IGGY2850F1 | ACTTCGT | C | | 666 |
| | | CAGTAAC | | | |
| | | GGACGG | | | |
| | | GGGTTGT | | | |
| | | TGCATTT | | | |
| | | GTGCTTA | | | |
| | | GG | | | |
| IGGY2850 | IGGY2850F2 | GAGTCGA | G | | 667 |
| | | GGTCATA | | | |
| | | TCGTGGG | | | |
| | | GGTTGTT | | | |
| | | GCATTTG | | | |
| | | TGCTTAGC | | | |
| SY4432 | | | | ACAGCAGCATTCAAGATAAGGTCTTCAAATATTCAAATATACATTTCAGTATACTAAAGGTTCTGCAGAG | 504 |
| | | | | AAATGGAAAATCCTTTNNGCTTTTATACCATACAGGTTAAGTCATGTTGCAATANACTAAAACCTCAATT | |
| | | | | CATTTCTGACTGTAACATTGGGAAGAAAGCCCAGCTGTTGGCTGATCTACCTTCCTTCCCAGCAACCTTCC | |
| | | | | TGTTAGTCCACCACTCATAGCCACTGCCAGTAGTAACAGAAACATCACCTTTCCTGTTGTCAAAATTGAAT | |
| | | | | TCTTTGGAAGAATTTACAGAATTTTGCTTGTGAAGGCATTGCTCTCCTTTTCCTACAGGATTGTCAGGCTT | |
| | | | | ATCGTCAGTTTTCTCTGTACANGCNTTANAGCTACTATTGGTGTCTATTTGCACCCTTTCTCTGTCAACAG | |
| | | | | GGTCTTTGGTCAGTATACCTTGTGAAGACCCTGACATGTTTCGAAGCAATACCCCAGTTTTATTTGCAAG | |
| | | | | ACACCG[A/G]GCAACATCTTCCCCGGTTAATTCAAATGAAACTCTGTGATCAACCAATGTTGCATTGCTT | |
| | | | | GGATGTCCATTGTCTGAATCTGCAAGAGTTGCTTCCTTAGAAATCTGGTTTTGCACAGAGATGTTGTTTT | |
| | | | | GATTGGTTGGCCCAGCACTGTCAGGTGTCAAACAGCCAGAACCTAACCTGGATTCCTGCCCCAGACCAT | |
| | | | | CAGGTGTCACACACCCAGAGCCTAATCGCGAAGCAAGCCCAACACCATCAGGAGTCAAGGATCCCGAAC | |
| | | | | CTAGTCTTGAACCTTGCCATGCACTGTCTGGCGTCAATGATCCAGATCCCAGTCTAGAACCCCATCTTCG | |
| | | | | GGTGGAGAAGTGTTCAACACCCAAGATCTTTGGTGTTTCCCCTTTGGGGAATTCAAGNGTAGGGGGTCT | |
| | | | | ATCAGGGAATGGGGTTGAGGTGCCAGAAGTTGAAAATGCTGATCCNGGTGATATGAGCTGGCCACCTG | |
| | | | | GGCTTCCAGGATATTGTTGATAAGG | |
| SY4432 | SY4432F1 | TGTGAAG | | | 668 |
| | | ACCCTGA | | | |
| | | CATGTTTC | | | |
| SY4432 | SY4432R1 | GCAACTC | | | 669 |
| | | TTGCAGA | | | |
| | | TTCAGAC | | | |
| | | AATG | | | |
| SY4432 | SY4432A1FM | AAGACAC | A | | 670 |
| | | CGAGCAA | | | |
| | | CATC | | | |
| SY4432 | SY4432A2TT | ACACCGG | G | | 671 |
| | | GCAACATC | | | |
| SY4336 | | | | AAGAAGGGATCATTGAGAAGCTTTGCTTGCGTAGCCCTTTCAAATTTACATGATTGATTTTTTCTGTTTCT | 505 |
| | | | | GCTCTAATTTTTGAAACCCACTTGGGAGAATGCGAGCTGAACTGAGTTTTGGGAATAGTATTATGACATG | |
| | | | | GTCATTTTGAAGAGATATTCTGTTGGGAGAATGCTGCCTCTTTCATTGTTTGGGCATCTATTATGCCCTAC | |
| | | | | CCATTATAGTATCATTCTTCCGTAGCAGGTCAAGATTTTTAATTAAAGTAAGGGAGAGGTCAATAATCTT | |
| | | | | TCAGTATGATAGGGTTGATTTTGTAAGTAACTGGAAAGTGCAATNGAAAAGGCAATTTGAGATGTTATG | |
| | | | | TGTTGCAAAAGAATGGAAATACAAGCAAAACAAAAAGAAAGTATGGATGGCTTTAGTGGTTCAATTTGA | |
| | | | | GGTGTCATCACAAGTTAAGAATTGGTTCACCAGANAGAGATTTGTAGATACTATATTGAGTNCACTGTA | |
| | | | | TTATGTATTTA[A/C]GATGGTGGCGTAGTTAGGAAAGGATATAAACATTCAAAGTTTAATAGATTGATTA | |
| | | | | AGTGTTTTCTAGAGATGTTCTTCACCTTTTTCGGCTGTTTAATGTGTATTGAATATAAATATTTTCCCGCTT | |
| | | | | AAGATTCTTTTCAGAAGACGGTCATTTCTTTTTATTCTCATATGCTTGATTTATTCTCATAGTCGTTTTTAAT | |
| | | | | AATATTAACAATCAATTTAGCAGCTCCAAGAAAAAATTATGTCAATATCTTTTCGTCTTAATTTATAAAAT | |
| | | | | TGCCTNCATACGTAATATAAAGATAGTTGNNNNNNTTTATTCTTGACCATGTTTTAATATTAANGATGAT | |
| | | | | GAAAGAAAAATACAAGTAAAACACTATTTAACAAATTNGTTTCAAAGTGGCCCAATATGTGTAATGGTG | |
| | | | | TGACACCGGTGGCTAGTATCTTGAACTTTTTAAANGATTTCAATTCTTAATTATTCAAATAAAGTAACATT | |
| | | | | TGTGGGAAGAAAAGTTGTCTCTTAA | |
| SY4336 | SY4336F1 | AGTGGTT | | | 672 |
| | | CAATTTG | | | |
| | | AGGTGTC | | | |
| | | ATC | | | |
| SY4336 | SY4336R1 | GGTGAAG | | | 673 |
| | | AACATCT | | | |
| | | CTAGAAA | | | |
| | | ACACTTA | | | |
| SY4336 | SY4336A1FM | CGCCACC | C | | 674 |
| | | ATCGTAA | | | |
| SY4336 | SY4336A2TT | ACGCCAC | A | | 675 |
| | | CATCTTAA | | | |
| SY4435 | | | | ATTACGCNATTCTGGAAGCCGCATTTGAGGAGAAAACGGAGANNANCAGGTTCTGCGTGGTGGATTTT | 506 |
| | | | | GAGATTGGANANGGNAAGCAGTATTTGCACCTCCTCAACGCNCTCTCGGCGCGTGACCAGAACGCGGT | |
| | | | | GGTGAAGATCGCGGCTGTGGCGGAGAACGGCGGCGAGGAGAGAGTGCGCGCCGTGGGAGACATGCT | |
| | | | | GAGTCTACTCGCNGAGAAGCTGAGGATCAGGTTCGAGTTCAAGATNGTCGCGACNCAGAAAATCACNG | |
| | | | | ANTTGACTCGCGAGTCNCTNGGATGCGAAGNGGACGAGGTTCTCATGGTGAACTTCNCGTTCAACCTG | |
| | | | | AANAAGATTCCCGACGAGAGCGTCTCNACNGAGAATCCTCGNGACGAGCTCCTGCGNCGCGTGAAGCG | |
| | | | | TCTNGCGCCGCGCGTGGTNACAATNGTGGAGCAGGAGATAAACGCNAACACGGCGCCGTTTTTGGCGC | |
| | | | | GCGTGGCNGAGACGCTGTCGTATTAC[A/G]GCGCGTTNTTGGAGTCCATTGAGGCCACCACTGCAGGG | |
| | | | | AGAGAAAATAACAATAACAACCTAGACCGAGTCAGNCTCGAGGAGGGACTGAGTCGAAAATTGCATAA | |
| | | | | CTCGGTGGCGTGCGAAGGAAGAGATCGCGTGGAACGGTGTGAAGTGTTTGGAAAATGGCGCGCGCGT | |
| | | | | ATGAGCATGGCGGGGTTCGNGTTAAAACCACTGAGTCAAAGCATGGCCGAGTCAATAAAATCGCGACT | |
| | | | | CACCACNGCCAACAACCGAGTCAACTCGGGACTGACTGTAAAAGAAGAGAACGGAGGGATTTGCTTTG | |
| | | | | GTTGGATGGGAAGAACACTCACGGTCGCATCTGCTTGGCGTTAACTCGGCTCNCNTTTTTTNCTTTTTTTT | |
| | | | | TNNNAATTTGGTTCGGAATATTATTATATATCACATTGTTACTATATTTTAACGTCATCTAGAGATAATGG | |
| | | | | AAAGGCCATAGATTTGGAAAATGATTATTATTATTANTANTATTATTAT | |
| SY4435 | SY4435F1 | AAGATTC | | | 676 |
| | | CCGACGA | | | |
| | | GAGCGT | | | |
| SY4435 | SY4435R1 | CAGTGGT | | | 677 |
| | | GGCCTCA | | | |
| | | ATGGA | | | |
| SY4435 | SY4435A1FM | ACGCGCC | G | | 678 |
| | | GTAATACG | | | |
| SY4435 | SY4435A2TT | AACGCGC | A | | 679 |
| | | TGTAATA | | | |
| | | CG | | | |
| SY4439 | | | | TTTTTTTTNNNNNNNNNATTGCACTTACCCTAGCAATTTCATGCTTCCAAAAGAAAATCCTTGTCTTGCTC | 507 |
| | | | | CAACCTCTCCATAGCCTCAGGNTCCAANGTTAGTTCCACATCAATGCTCCTCCCTCCACTCTTCCCCGGGT | |
| | | | | ACAAATAAATCATCCCATCAAACTTGTTATTAGTTCCACTCCTCACATTCTCTGGCTTNCCCCACCCAAAAT | |
| | | | | CAATGTCATAAACCTTAAACCTTGGGGAGCTTCCAACAGCCACACAATTCACCCCAGCATCTTTGAATTG | |
| | | | | AAAATTTTGGGTGTACTCTCCCANTCCTTGTTACGTTCATCAATTGCNTTAGCATTGTGNGNTTCAATG | |
| | | | | GCTTTCTGNANNAATGAAGCCCCAAATTGTGGCGGATGGGCGGCTAATANNCCAACCGCNGTAACGGT | |
| | | | | AAAAATAGCTTGAATTAGGTTTCCNAAATAATTNTCCGGCATTGGTGGGTCCACCCGCTTCCGNCAATCG | |
| | | | | GCGAAGAC[A/G]GTGAACACCGTGTAGTCCTCNGGCTTCAAGTTACGTGCATGGCTTACATGGCGCCAA | |
| | | | | ACGTGGGAGGANAGAGCCTGAAATGTTGAGAATGGTTTTGAGCCATCGGATGGNGGGNTNTCGTTGA | |
| | | | | CCGTTGACTTGATCTTGTCGATGGCTGACTCGGAGAATTTGAAGATCTTNTCCCTAAGTGCTGGCGCGG | |
| | | | | GCTTTGCCTCACCGTTGGAAGTTGGTGGGCCGTTGGGCTCAGGAAGCGAGAGGTCCAATTTCACGCGTG | |
| | | | | TGTTCCGGGCCTTNGTTCGGTCCAGGAAGGGTGGTGCTGACGTGGAGGGTGAACCGCTGCAGATCTCG | |
| | | | | GCCCATGAGGTCATGAATTGCCAGGTGGCAGTNCCGTCCAAGACAGCATGGTTGAATGCTAGGCCCATT | |
| | | | | GCAAGCCCATCTTTGAGCTTCGTTAACTGNGAGCAAGAATAGAATGCAAATGAAGTGAGAACATGAAA | |
| | | | | AATAAAAATAAAAAGATATCATATGATTTANAA | |
| SY4439 | SY4439F1 | TGGGTCC | | | 680 |
| | | ACCCGCT | | | |
| | | TC | | | |
| SY4439 | SY4439R1 | CAAGATC | | | 681 |
| | | AAGTCAA | | | |
| | | CGGTCAA | | | |
| | | CGA | | | |
| SY4439 | SY4439A1FM | AATCGGC | A | | 682 |
| | | GAAGACA | | | |
| | | GTGAAC | | | |
| SY4439 | SY4439A2TT | ATCGGCG | G | | 683 |
| | | AAGACGG | | | |
| | | TGAA | | | |
| IGGY3104 | | | | GAAAAATGAACATATTAACAAGAACGTTATTGCTAGTGAGATAATCAACATAGATTATGGACAATTACAT | 508 |
| | | | | TATTACAAGTTTCCTTATCCTTCACCATACTATGCCAGATGTCAGATGATCCTCATAAGTACAAATATATA | |
| | | | | TATATATATCAAAGGAAATGACATATATACCTTTATGATGCAAACTAACTAAAGCACCATTTTGGATTCTG | |
| | | | | CAAAGGTAATTAAGGAACATGAAATTAAACTATGTCTTGCTTCAAAGAAATTGCTACCCTTTCTAGTTAA | |
| | | | | TTATACCGGATCTGCTAT[C/G]ACTAGAGAGACTTCTGATGATGATGATAGCTATTTTATTTCACTCAGTT | |
| | | | | ATGAAGTGGGTTTGGTCCACCTGGAGTAGCTGTATGTGAAACAGTATGAAATCCACTGACCTTGTTGTCT | |
| | | | | TTGATTTCAGCAGAATTATAACTATGTGGGAATGAAGAAAAGGGGATGCTGGTTCTTGTTCTTTGTTCCA | |
| | | | | TGATCTTTTCCTTATCCCCCCAGGAAATGTGCCTGCAGCTTGAAAGATGGAGCAGTATTACTAGTATAAA | |
| | | | | AAGAAGGAACATAATAATTAGAAATCTAGATTTATGAACTC | |
| IGGY3104 | IGGY3104F3 | TAGCAGA | | | 684 |
| | | TCCGGTA | | | |
| | | TAATTAA | | | |
| | | CT | | | |
| IGGY3104 | IGGY3104F1 | ACTTCGT | C | | 685 |
| | | CAGTAAC | | | |
| | | GGACTCA | | | |
| | | TCATCATC | | | |
| | | AGAAGTC | | | |
| | | TCTCTAGTG | | | |
| IGGY3104 | IGGY3104F2 | GAGTCGA | G | | 686 |
| | | GGTCATA | | | |
| | | TCGTTCAT | | | |
| | | CATCATC | | | |
| | | AGAAGTC | | | |
| | | TCTCTAGTC | | | |
| SY4418 | | | | ATCCAGGAGACNTGCCCAACTATGATGATGCTAAGCCANTACACCTTAATACTGAGCAACATGATGAAA | 509 |
| | | | | TAACCAGTTCAAGTGGAAGTGTAAGTTTTGGTTTTCCTGAAACCTATTCTAGTTCGGGTGCTGATAATGA | |
| | | | | GACTGGAATTGTTAGTGTTGTGGTCATTTCTGAGCTAAATAACATGATTTCAGATCCTAAGTTTTTCAATG | |
| | | | | AAGCTGGTCAAGAGAATATTCTGTCAGCTTTAAAGAATGAAAACCTTNACCTGAACAAAATTCCACAGG | |
| | | | | TCTCCGNTGAGGGAAATGAGCCTTCCTTTGAAGAGCGGAGCATTCCNGGAAATGACCTGTTTGAAAAAT | |
| | | | | CATCTATTTCAACANCAGNCAATNCATTGGTAGATGAGCAGGTTAGAAATGATAATTATGAGGTTGATG | |
| | | | | AAGTTAAATCTGAATCTTCAAATTCTGGATCCTTTTTCTCTGTTCCCGGCATTCCCGCTCCATTAGTAGTTT | |
| | | | | CTACAGCTGTA[A/C]AAGTGCTTCCGGGAAAGATTTTGGTTCCTGCAGCTGTTGATCAAGNTCAGGGCC | |
| | | | | AAGCACTAGCTGCATTGCAAGTTTTAAAGGTAGTTATTTGTTCTTATTCTCATGTATCAAGGTGACTATAA | |
| | | | | TGCTATGTGCATTTATAGTTTAATTCTAGTTTTTACGTATATATTTACACTGGTTATTTCTTAAATCTATTTA | |
| | | | | ATTACTCACAATAAAAAAAGATGACCCGGAGTACAAGGTTCCTGGGAAGGGTAGAGCCTATTTCCAGGA | |
| | | | | TTTGAACCCATGACCTCTAGGTCACAAGATAGCAATGTCACTGTTGCACCAAGGCTCCCCCCCTCCCAGT | |
| | | | | GGGCATACTAGCTTAAACTTCAGCCATCTTGATTCACTGTGATTTGTACTAAGCTATACTCTAACCTATTG | |
| | | | | CCAAAGATTTTCTACAAGGAACAATCTATCTTACTGTTGAAGTAACTAAAATCAATAATTTCTGGTAGCCT | |
| | | | | TATGCTTGTTCCCAGGTCAAC | |
| SY4418 | SY4418F1 | GGCATTC | | | 687 |
| | | CCGCTCC | | | |
| | | ATTAGTAG | | | |
| SY4418 | SY4418R1 | CAACAGC | | | 688 |
| | | TGCAGGA | | | |
| | | ACCAAA | | | |
| SY4418 | SY4418A1FM | CCGGAAG | C | | 689 |
| | | CACTTGT | | | |
| | | ACAG | | | |
| SY4418 | SY4418A2TT | CCGGAAG | A | | 690 |
| | | CACTTTTA | | | |
| | | CAG | | | |
| IGGY2851 | | | | ACTGATATGGCTGAAGCTGATCTGAATACCACAGACTTGTTGCCCCTATCACATGACATAGAACACACTG | 510 |
| | | | | GGTTAATTCAGAATACTAGCAGTGAGGTGGTTTCCAGTATAGATAAAAATGAGATCATAGATCTTCTGA | |
| | | | | GCCCTTCCCCACCTAAGAAATCCAATTTATNCTCAAAATGTCAGCAATCAAGTGACCAACATATTGAAGT | |
| | | | | GATTAATTTGAGTGATTCAGAAAATGACATGTCCGTTGAAC[A/G]CAAGCAGAAAGCGAAGGAGCTGA | |
| | | | | GATTGTTCTTAGCTAGTATTAGGAATGAAATTCATTGAACAATGTTTGTACAAGTAATATAAAAGCAGGT | |
| | | | | TTTATTAGTATTGATATCACACATTGACTAGAATTTAGTACTTACAAGATTGACACCCTCCCCAACTTTCA | |
| | | | | ATTCGGTTTTGTAAGATTTAGTTAGATTGAAAGTCCAACTTTTAATAGTGTAATTAAAAAACAAATGAGT | |
| | | | | TACCATTTGTGATCTT | |
| IGGY2851 | IGGY2851F3 | TTCAACG | | | 691 |
| | | GACATGT | | | |
| | | CATTTT | | | |
| IGGY2851 | IGGY2851F1 | ACTTCGT | A | | 692 |
| | | CAGTAAC | | | |
| | | GGACGCA | | | |
| | | GCTCCTTC | | | |
| | | GCTTTCT | | | |
| | | GCTTGT | | | |
| IGGY2851 | IGGY2851F2 | GAGTCGA | G | | 693 |
| | | GGTCATA | | | |
| | | TCGTGCA | | | |
| | | GCTCCTTC | | | |
| | | GCTTTCT | | | |
| | | GCTTGC | | | |
| SY4440 | | | | AATCATGAAAACGGTATCGTTTCGANGGAGTAGCAGGACAACTTGAAAAGATACNATAGAAAAACGAA | 511 |
| | | | | GTCGTAATGGTGTCTGATNATTTTAGGAACTAAAANAGTGATATGCTATGATTGTACTACAAGTGTAGT | |
| | | | | GGCAGAAAGCAAATTTCTATCTCCCGGAAATTAACCAAAAAAGACTACGACTAAAACTAAAGAGACTAA | |
| | | | | GGAAAATAAGATAAACAAATATTACTTGTCAACTTTACCTTGAAGGCCTGGTGTAGAAGGATTNNCCGN | |
| | | | | CATTGGCNATTGAGTTTCTTCANCACTACCCCTGTAAAATTGGAACAATTCAAACCTGAGATTGCAGCTN | |
| | | | | GGATATAAAACTCTTCCCCCTACGCTTCCCAAGCGGAACCATGGAATTTTTCCATTTATATCCTCCAGACA | |
| | | | | NTTCTTACAACCATCACTAGACAAATCCNGCGTGCATTGAGCAAGAGTATACAGAGTTTGCAAATCAGTC | |
| | | | | AATTTTAATGATTT[C/G]GTGACATATCTCTCAGTGGTATCCCCTGCCTCTTGGGCCAGCTTAACTATGGT | |
| | | | | ATCTGATAATGTANAAGTGAAGNAGTCTTGCCCGGGGATGATGCTGGTGGAGGAACTGGTAAGATTCA | |
| | | | | GCATGTCAAAATTTGGACTTTNTTCCACTTCTGAGAAGAAATACAGATTGGAATATCGAATCATGCAGTG | |
| | | | | GCTGTACCAAATGATTCCCTCTTGAACTGAATTACACACTGAGGATATTCGGTGGGTTGCGTTGAGGAC | |
| | | | | GCATTGTTGGCAGAGTTGAGAGGGAAGATNGCCTCGGCACATGAAGAGGCCATACACAGTGTTCTCTA | |
| | | | | CGTTGTCCNTGTAAGATTTTNTCCCATTTGTGGCATTNGAAGACAAGTAAAAGAGAAGGGTCTTGAGAT | |
| | | | | ACATTTGGAAAGTGCTGNCAACANTTACATCGGTTGGGCAACTNTGGTTTAGATAAGTTGGATCTTCTG | |
| | | | | AAAATTGTGAATCCGCATCGGGAAAATTTGTTGC | |
| SY4440 | SY4440F1 | CGTGCAT | | | 694 |
| | | TGAGCAA | | | |
| | | GAGTATA | | | |
| | | CAGA | | | |
| SY4440 | SY4440R1 | CCATAGT | | | 695 |
| | | TAAGCTG | | | |
| | | GCCCAAG | | | |
| | | AG | | | |
| SY4440 | SY4440A1FM | TCAATTTT | C | | 696 |
| | | AATGATT | | | |
| | | TCGTGAC | | | |
| SY4440 | SY4440A2TT | TCAATTTT | G | | 697 |
| | | AATGATT | | | |
| | | TGGTGACA | | | |
| SY0127AQ | | | | TNTGAAAAAANTAATAAAGAAAAATAACATATATTAATATTTGATAGTAGTGTTTAACACACAAGATATT | 512 |
| | | | | ATTAGCAGCACNCTATTTAATATACTCTTTCTAAAACACTTTATTATTGTTGAAATTTATGAAAAATTACAA | |
| | | | | AATCTTGTTAACCCCTCTTTCCAATATTTAATACAAGATTCAGTCATTTTTAATAAATTTCATTTAATAATA | |
| | | | | AAAAGTATATTTGAGGAAGAATCTATAGATATTTGTGTATT [symbol] TTACTCTTACCGGTTTGACCTCCAA | |
| | | | | GGAAATTCTGCCAGAGGTAGTTTGCAAGTTGAGTGGCATCATCAGCTGANCTGAGGGAGTAGCTTCCA | |
| | | | | GCACCACCACCNAGGGAGAGCAACACTTTGATGCCAAGGTCTTGGCAAGTTTTGATGTCACAGTT | |
| SY0127AQ | SY0127AF1 | GCAGAAT | | | 698 |
| | | TTCCTTG | | | |
| | | GAGGTCA | | | |
| | | AAC | | | |
| SY0127AQ | SY0127AR1 | CCCCTCTT | | | 699 |
| | | TCCAATA | | | |
| | | TTTAATAC | | | |
| | | AAGATTC | | | |
| | | AGT | | | |
| SY0127AQ | SY0127AA1FM | CGGTAAG | A | | 700 |
| | | AGTAATA | | | |
| | | ATACA | | | |
| SY0127AQ | SY0127AA2TT | CGGTAAG | G | | 701 |
| | | AGTAACA | | | |
| | | ATACA | | | |
| SY1044BQ | | | | CTTATAAAAGCCACAAGCAAATTCCTCNAAGATGCCGAAAACAAACCAATTTACCAGAGTACAAAAGTG | 513 |
| | | | | TGAACGGATCATAATAANCATG[A/G]TGAAGAAAGGAACTACATACATACAAATGATACAAAAACAGT | |
| | | | | GATTCATTTAGTTTTCTTGAATCCACAAAATGAAACTAGACAGTGGATTTTATTTCATCGATCACTGTCTA | |
| | | | | AGAACCATTAGCTTGAGGAGTTGAAGACTTCTTTCCCTCGATGTCCATCTCTTTTACACTATCACTCAGTG | |
| | | | | AAGACGACTCACATTTC | |
| SY1044BQ | SY1044BF1 | CAAGAAA | | | 702 |
| | | ACTAAAT | | | |
| | | GAATCAC | | | |
| | | TGT | | | |
| SY1044BQ | SY1044BR1 | AGCCACA | | | 703 |
| | | AGCAAAT | | | |
| | | TCCTC | | | |
| SY1044BQ | SY1044BA1FM | CCTTTCTT | G | | 704 |
| | | CACCATG | | | |
| SY1044BQ | SY1044BA2TT | AGTTCCTT | A | | 705 |
| | | TCTTCATCA | | | |
| SY0571AQ | | | | TTTTTCTCTCCCCTCAAGGCAAATAACATGAGACGGAAAAANGGAGGAGAAAAAGTGAAAAACAAGAA | 514 |
| | | | | AGTGAGAAATTAGATAGTANCACTTCTCAATCAGACACACCATTAAGCCACTACCAAAACTAAACAAAAC | |
| | | | | TTTGCACCAGCCAGAAGACAGTTAACATTAACAACAACGCAAATAAGGAAAACATATACAATGCGTTAG | |
| | | | | CTGAGCAAAATTTGCGTCAAGTATGCTGCANTTTAGGCAC[A/G]GCATGAAGCAATCCGATTAACAAGT | |
| | | | | CAAGTCTTCTATCCGCTTAGCAGACAAGAGATGATCTCAAAGATGTAGGTAGTTGAGTGCATGATGACC | |
| | | | | AACGAATGACTGATTCAGTCACCATAAGGTCAAGTTGCTCACACTCACCTAGTCCAATTGTCCTGTTTCTC | |
| | | | | TTGCTGTGGATTCCNAATACCTTATGTCCATTCATTCCNCTTGCCCTTTTGGCCTCTACAGGCTTGCGATC | |
| | | | | NGTTTCTTTAACCTCACGTCCAACNCAAAGAGGAGAATCTTGTAGCATAAGCA | |
| SY0571AQ | SY0571AF1 | GCTAAGC | | | 706 |
| | | GGATAGA | | | |
| | | AGACTTG | | | |
| | | AC | | | |
| SY0571AQ | SY0571AR1 | GCACCAG | | | 707 |
| | | CCAGAAG | | | |
| | | ACAGTT | | | |
| SY0571AQ | SY0571AA1FM | ATTGCTTC | G | | 708 |
| | | ATGCCGT | | | |
| SY0571AQ | SY0571AA2TT | ATTGCTTC | A | | 709 |
| | | ATGCTGTG | | | |
| SY0096C | | | | ACTTCACACCACAGGGCGATGATGTGCCTGGCGAGGTTGATTATAACCTTTAGGAGAAGCACCACAAGC | 515 |
| | | | | ATCTTGAGCACCTTGGGGAACTTGGTGCTGCGGCTGCCGGTGCTTATGCCTTGGTAATTAATTATATATC | |
| | | | | TTCCTTCAATAATATATTTTGTTCACGATCGTTTATTTAATTTGAAATAGATTTATATATTACTTATGTGAG | |
| | | | | ATGATTCACACCCCCTTTTTATATATTTTAGCTTTAAAATGTTACCTTCACCAGAATAAATAAAAGAAGTG | |
| | | | | CAAACTCTTTGNTAATCGAGGGAAATATATATACCTCCCCCACATATACATCATCACTTAGACTTGGACGT | |
| | | | | ATCTAAATCGGTTAATTTTAATATGTTTATATGTATGCGTGTGCATTAATAATTTTCATATNTTTTTTTGTA | |
| | | | | AGCATTTTAAAGCCTTACATATTGAAAAAATTGTCATTAATTTGTGTTTTGGACATGAATTAATCCTATCA | |
| | | | | TCTTGAATCATGTCCACAAATAATTTCAATTTGACATTTTCTTTTTAAGGCGGCCAACATATATACATACTT | |
| | | | | GATCTTTGTACTTTTGGATTGTGATGCTTTAATAATTGTGGATAATAGATATAAAAATATATTATAGCTAT | |
| | | | | ATAGTATTATTTC[A/T]CTCTACCCACTGTGTGTAACTATACTGTCTATACATCTCATGTGGTTTGTTTTTT | |
| | | | | CTTAAATGAAAATTGTTGGGGTCATGGGTGTATAGAGTATAGTAGTACTTTTATGACGCCATCAGAAGAGAA | |
| | | | | ACAATAAAAGTTCATAAAAAATTAGGTGTAGAAAAAGATGGAACTTAAGAAAGAAAAAAGAGAGAGAG | |
| | | | | AAAGTGATTAAGTGATGTAATATATAATGAGAAATGAAGAAAAAGATAGGAAGACAAATAAAGTAAAA | |
| | | | | NAAAGAAAGAAAGAAAGAAAGATATATAACAAAAAATTGAAATGTATATTCTAATATGTATTGAAAACA | |
| | | | | AAATTGATCCCTTTTTGCTGCAATGGTTAATTTTATGACAGCATGAGAAGCATGAGGCCAAGAAAGACCC | |
| | | | | AGAGCATGCTCACAGGCACAAGGTAGAAGAGGAGATTGCGGCNGCAGCTACTGTTGGTGCTGGTGGTT | |
| | | | | TTGTCTTGCATGAACACCATGAGAAAAAGGAAGTTAAGAAAGAGGATGAGGAAGCTCATGGAAAGAAG | |
| | | | | CACCACCATCTTAAGGGTGAACATGATAAATATTCATATATAATTATATC | |
| SY0096C | SY0096CF1 | AAAACAA | | | 710 |
| | | ACCACAT | | | |
| | | GAGATGT | | | |
| | | ATAGACA | | | |
| | | GT | | | |
| SY0096C | SY0096CR1 | TTTTGGA | | | 711 |
| | | TTGTGAT | | | |
| | | GCTTTAA | | | |
| | | TAATTGT | | | |
| | | GGAT | | | |
| SY0096C | SY0096CA1FM | CAGTGGG | A | | 712 |
| | | TAGAGTG | | | |
| | | AAA | | | |
| SY0096C | SY0096CA2VC | AGTGGGT | T | | 713 |
| | | AGAGAGA | | | |
| | | AA | | | |
| SY0096A | | | | ACTTCACACCACAGGGCGATGATGTGCCTGGCGAGGTTGATTATAACCTTTAGGAGAAGCACCACAAGC | 516 |
| | | | | ATCTTGAGCACCTTGGGGAACTTGGTGCTGCGGCTGCCGGTGCTTATGCCTTGGTAATTAATTATATATC | |
| | | | | TTCCTTCAATAATATATTTTGTTCACGATCGTTTATTTAATTTGAAATAGATTTATATATTACTTATGTGAG | |
| | | | | ATGATTCACACCCCCTTTTTATATATTTTAGCTTTAAAATGTTACCTTCACCAGAATAAATAAAAGAAGTG | |
| | | | | CAAACTCTTTGNTAATCGAGGGAAATATATATACCTCCCCCACATATACATCATCACTTAGACTTGGACGT | |
| | | | | ATCTAAATCGGTTAATTTTAATATGTTTATATGTATGCGTGTGCATTAATAATTTTCATATNTTTTTTTGTA | |
| | | | | AGCATTTTAAAGCCTTACATATTGAAAAAATTGTCATTAATTTGTGTTTTGGACATGAATTAATCCTATCA | |
| | | | | TCTTGAATCATGTCCACAAATAATTTCAATTTGACATTTTCTTTTTAAGGCGGCCAACATATATACATACTT | |
| | | | | GATCTTTGTACTTTTGGATTGTGATGCTTTAATAATTGTGGATAATAGATATAAAAATATATTATAGCTAT | |
| | | | | ATAGTATTATTTCNCTCTACCCACTGTGTGTAACTATACTGTCTATACATCTCATGTGGTTTGTTTTTTCTT | |
| | | | | AAATGAAAATTGTTGGGGTCATGGGTGTATAGAGTATAGTACTTTTATGACGCCATCAGAAGAGAAACA | |
| | | | | ATAAAAGTTCATAAAAAATTAGGTGTAGAAAAAGATGGAACTTAAGAAAGAAAAAAGAGAGAGAGAA | |
| | | | | AGTGATTAAGTGATGTAATATATAATGAGAAATGAAGAAAAAGATAGGAAGACAAATAAAGTAAAANA | |
| | | | | AAGAAAGAAAGAAAGAAAGATATATAACAAAAAATTGAAATGTATATTCTAATATGTATTGAAAACAAA | |
| | | | | ATTGATCCCTTTTTGCTGCAATGGTTAATTTTATGACAGCATGAGAAGCATGAGGCCAAGAAAGACCCA | |
| | | | | GAGCATGCTCACAGGCACAAGGTAGAAGAGGAGATTGCGGC[A/G]GCAGCTACTGTTGGTGCTGGTG | |
| | | | | GTTTTGTCTTGCATGAACACCATGAGAAAAAGGAAGTTAAGAAAGAGGATGAGGAAGCTCATGGAAAG | |
| | | | | AAGCACCACCATCTTAAGGGTGAACATGATAAATATTCATATATAATTATATC | |
| SY0096A | SY0096AF1 | AGACAAA | | | 714 |
| | | ACCACCA | | | |
| | | GCACCAA | | | |
| SY0096A | SY0096AR1 | AGGCACA | | | 715 |
| | | AGGTAGA | | | |
| | | AGAGGA | | | |
| | | GATT | | | |
| SY0096A | SY0096AA1FM | CAGTAGC | A | | 716 |
| | | TGCTGCC | | | |
| | | GC | | | |
| SY0096A | SY0096AA2VC | CAGTAGC | G | | 717 |
| | | TGCCGCC | | | |
| | | GC | | | |
| SY0569AQ | | | | CTTTGGGCTGCACAGAAGGGGCAAAAGAAGACATAGAAAATAAAAAATCTACGGATGGTCGCAGTCAA | 517 |
| | | | | GGAGATTTGTTTGAAGAGAATTTTAAAGAACTGAAGAAATGGGTTAATGTGAAGTCAACTAAATATGGG | |
| | | | | ATCCTTTTAGTAACTCGTGAGAGGCGAGCTCAAAGGCTTGGGACTGCGTTGAAGGTATTTTGTTTTACAA | |
| | | | | GTCTTGCACTGGTTGCTGCATGTAACTCATCTATTTATTTATTACTAATTTACTAATAAAATATCATATGAC | |
| | | | | ACTGGAGTCTACTTGAGTATGTGGACTCGATAGTCGATAATATTCTTTGATCCTCAGTGAGATTTGCCTT | |
| | | | | GAAGTATTCACTCAGCTTATAGTAGATAAACNACCAAACTACTTACTTCTGAACCTCTTCTCACTTGATTC | |
| | | | | AGGTACTGTGTGACATAATTCAAGATGACGCAGAGCCTGCCAAGAAGAAATTCTATGACCTTAAGCTCT | |
| | | | | CTTTGCTTGATGAGATTGGATGGACACATTTGGCTGCATATGAGAGACAATGGATGCATGTGCGTTTCC | |
| | | | | CTCCAAGCTTACCTCTTTTCTAGGACCTGCCCATCGGGAAGATGCTGGACAGCAATGTTAGGACTTTGGA | |
| | | | | ACC[A/G]TGTCCTTTTCCTCNATATTTATGTAACACTAGACCCTTTACGTGACCTATCCTTTCTTTTTGTGA | |
| | | | | ACATCTTGGCCTTGGTATTTCGAACATGGCATGGGAACTTTGCCATGCCTTCAGTGTGGCTGCCACATCA | |
| | | | | GTGG | |
| SY0569AQ | SY0569AF1 | TCGGGAA | | | 718 |
| | | GATGCTG | | | |
| | | GACA | | | |
| SY0569AQ | SY0569AR1 | TCGAAAT | | | 719 |
| | | ACCAAGG | | | |
| | | CCAAGATG | | | |
| SY0569AQ | SY0569AA1FM | AGGACTT | A | | 720 |
| | | TGGAACC | | | |
| | | ATG | | | |
| SY0569AQ | SY0569AA2TT | ACTTTGG | G | | 721 |
| | | AACCGTG | | | |
| | | TC | | | |
| IGGY476 | | | | GATCCCACATCAACTAGTGATAYTACCAAAATAATATATATAAGCGAGGAACAACATTCRTCTAGTGAGC | 518 |
| | | | | TAGCTTSTGAGGTTGAGTTAGGTTCAAAKACGAATGTTAGRAATTCTACTATCACTAATATTGGTGATGR | |
| | | | | GGTTGTTGCGTYGGARAGAAACCTTTCRAGGTCGAACTCGACGGGGCATTCCCTTGTGGAGGAGCAAG | |
| | | | | GGAAGGGTGTGGAGAGGTACACGTTGAGGTTGCCCGAAGATGTGAGGAGGTACATTCTAGTGAACCAT | |
| | | | | GGAAGAA[C/G]TGTTCAACGTTCCGCGAGTGTTAARGGGGGGTGTTGGAGTGACAGCGAAGAGAGTTA | |
| | | | | CGTGGGGAAGAGGGTGGAGAAGAGGTGGGTGATCTGCACGCCGCCATTTGTGGCGCAACATGRTTGA | |
| | | | | AGAATTTCGTCGAACAATTGGTCTGCGTTCTGCGTTGCGCCTTCTATAAAGGGTCGTTGTCAATTCTTGC | |
| | | | | AAGAGATTGTGAGAGTTTGGTGTTACAGAGATGAAGCAGAGGACTGAAATGGAAGAAGAG | |
| IGGY476 | IGGY476F3 | TCTTCCAT | | | 722 |
| | | GGTTCAC | | | |
| | | TAGAATG | | | |
| IGGY476 | IGGY476F1 | ACTTCGT | C | | 723 |
| | | CAGTAAC | | | |
| | | GGACACA | | | |
| | | CTCGCGG | | | |
| | | AACGTTG | | | |
| | | AACAG | | | |
| IGGY476 | IGGY476F2 | GAGTCGA | G | | 724 |
| | | GGTCATA | | | |
| | | TCGTACA | | | |
| | | CTCGCGG | | | |
| | | AACGTTG | | | |
| | | AACAC | | | |
| IGGY515 | | | | AAGCTTTCCTTGCACAAAGTAAGCTTTGTCACTTCATGCCTTTGCTGCCCTTTTTGATCAAATGCTTKGCTG | 519 |
| | | | | GGTCTTCAATTAATATTTGCCTAATCAAAACTATTTTCATGCAGGGTGGAAGGAAGCTATCTCATCAGAA | |
| | | | | CATGTGACATTGGTTATTTGCCCCGACTCGGAACCTCCTGGGTGCGAGGAGATACAGGATTTGAAAACA | |
| | | | | GCAGCATGTCAATCTTCTGATATGGATGGATGTGACATTGTGGCAAATGCAGATAAAAGATTGCCTGCA | |
| | | | | ACCTCCAAAGTTGCGAAATCCAAACCCAGGTTGAAGAAGTCTGAAAAGGGAACCAAGATAAAGTATATT | |
| | | | | CC[A/G]AAACAGAAGACAAATACCTAGTGTGAAAGAATAAATTGGAGTTGTTAGTAAGGCAGATATAC | |
| | | | | AGAGTTTGACTTTGTTGCCAATTTATTAAAGAGAGGTCCAAGTTTTACCGGATGGTCTTCTGTCAGAATG | |
| | | | | TGAAAG | |
| IGGY515 | IGGY515F3 | AACAGAA | | | 725 |
| | | GACAAAT | | | |
| | | ACCTAGT | | | |
| | | GTG | | | |
| IGGY515 | IGGY515F1 | ACTTCGT | A | | 726 |
| | | CAGTAAC | | | |
| | | GGACGGA | | | |
| | | AAAGGGA | | | |
| | | ACCAAGA | | | |
| | | TAAAGTA | | | |
| | | TATTCCA | | | |
| IGGY515 | IGGY515F2 | GAGTCGA | G | | 727 |
| | | GGTCATA | | | |
| | | TCGTGGA | | | |
| | | AAAGGGA | | | |
| | | ACCAAGA | | | |
| | | TAAAGTA | | | |
| | | TATTCCG | | | |
| SY3108 | | | | GACACGAATGCCATCCAACATAAAAATGATGCGATCCAGTGATTGTAACCCCAACTGACAAACACAATTT | 520 |
| | | | | TTGTTTTAAATGAAAACTACCATCACAATA[A/T]GCATATAGAAATTGATTAAAAGCTCAAATTCAAGAT | |
| | | | | ACTTCCTTATCTTCCTGAATTCCATAAACCAAAACTAAGCATGCACCATCTTGAGCAGACAGAC | |
| SY3108 | SY3108F1 | GTAACCC | | | 728 |
| | | CAACTGA | | | |
| | | CAAACACA | | | |
| SY3108 | SY3108R1 | TGCTCAA | | | 729 |
| | | GATGGTG | | | |
| | | CATGCTT | | | |
| SY3108 | SY3108A1FM | ACTACCA | A | | 730 |
| | | TCACAAT | | | |
| | | AAGC | | | |
| SY3108 | SY3108A2TT | ACCATCA | T | | 731 |
| | | CAATATG | | | |
| | | CAT | | | |
| SY3112 | | | | CTTTGATAATCGAGGGAAATATATCTCCCTCCCACATATACATCATCACTTAGAATTGGACGTATGTAAAT | 521 |
| | | | | TGGTTAATTCAGCCCAAGACAAAATGGAC[A/C]AAGTGCGCCAACAAAGATAGAGTTAGCTATAGCTTA | |
| | | | | ACTGCACGTATCATAAAATTTGTTTAAAGTAATTACATAGATAGCAAAAACCAGAAGAACTAAA | |
| SY3112 | SY3112F1 | CAAATTTT | | | 732 |
| | | ATGATAC | | | |
| | | GTGCAGT | | | |
| | | TAAGC | | | |
| SY3112 | SY3112R1 | TCCCTCCC | | | 733 |
| | | ACATATA | | | |
| | | CATCATC | | | |
| | | ACTT | | | |
| SY3112 | SY3112A1FM | TTGGCGC | C | | 734 |
| | | ACTTGGT | | | |
| SY3112 | SY3112A2TT | TGGCGCA | A | | 735 |
| | | CTTTGTC | | | |
| SY3110 | | | | CACAAAGAGAATCTTTGTTACCCCTGATGGTAATCTTTGAAAAATATACTTCCAAAAGCTCTCTCCTTAAG | 522 |
| | | | | GGGAAAATTTGGGTAAAGATGTGTATTTT[A/G]ACTTTGATCTATCTCTCTTAATGAACCTATACCCAAAC | |
| | | | | ATTGAATCTGTCCCAAATACTCACGGTTCTAAACAAGACCTGGCACATAATCTTATTTGAAT | |
| SY3110 | SY3110F1 | ACCCCTG | | | 736 |
| | | ATGGTAA | | | |
| | | TCTTTGA | | | |
| | | AAA | | | |
| SY3110 | SY3110R1 | GAACCGT | | | 737 |
| | | GAGTATT | | | |
| | | TGGGACA | | | |
| | | GA | | | |
| SY3110 | SY3110A1FM | TAAAGAT | A | | 738 |
| | | GTGTATT | | | |
| | | TTAACTT | | | |
| SY3110 | SY3110A2TT | AAAGATG | G | | 739 |
| | | TGTATTTT | | | |
| | | GACT | | | |
| SY3114 | | | | GGGCCCTCCAATTTGTTATTAGAACAATCCAACTCAGAAAGTTGAGTTGAGCCAAATAACGAAGATGGG | 523 |
| | | | | ATCGGGCCTCCAAAATTGTTTCCCTCAAGAT[A/T]GAGAGTATTCAATTTGTTTAGCCTGGCAAACACAT | |
| | | | | CTGGGATTTGACCAATAAATTTATTATGTGAAAGATCCAGGTGAATGAGATGTTGAAGATTTGAA | |
| SY3114 | SY3114F1 | GGGATCG | | | 740 |
| | | GGCCTCC | | | |
| | | AAA | | | |
| SY3114 | SY3114R1 | TGCCAGG | | | 741 |
| | | CTAAACA | | | |
| | | AATTGAA | | | |
| | | TAC | | | |
| SY3114 | SY3114A1FM | TTTCCCTC | A | | 742 |
| | | AAGATAG | | | |
| | | AG | | | |
| SY3114 | SY3114A2TT | TTTCCCTC | T | | 743 |
| | | AAGATTGA | | | |
| IGGY2357 | | | | TCTTGATGTGGAAAGGTTCAGAACGAATATTCAAAACTAAAGTGTTACTACTTGTAAAAAGCATTGATCT | 524 |
| | | | | CTCAAGCAATCACTTTTCTGGAGAAATTCCACAGGAAATAGAGAATTTATTTGGATTGGTTTCATTGAAT | |
| | | | | TTATCAAGAAACAATTTGATAGGGAAAATTCCCTCAAAAATTGGAAAGCTAACATCACTTGAATCTCTTG | |
| | | | | ATTTGTCAAGAAACCAGTTGGCTGGTTCAATTCCTCCGAGTCTTACACAAATTTATGGCCTCGGCGTGTT | |
| | | | | AGATTTGTCACATAACCATCTAACTGGAAAAATTCCAGCCAGCACACAGTTACAGAGTTTCAATGCCTCG | |
| | | | | AGTTATGAAGATAATCTTGATCTTTGTGGACAGCCACTTGAGAAATTTTGTATTGATGGGAGACCTACAC | |
| | | | | AAAAACCAAATGTTGAAGTTCAA[C/G]ATGACGAATTTTCACTTTTCAATCGTGAATTTTACATGAGTAT | |
| | | | | GACATTTGGATTTGTTATAAGCTTTTGGATGGTGTTTGGCTCAATCTTATTCAAGCGTTCTTGGAGACATG | |
| | | | | CCTATTTCAAGTTCTTGAACAATCTATCAGACAATATTTATGTCAAGGTAGCAGTATTTGCTAATAAAATG | |
| | | | | TCAAAGGTGTATGGCTGAAGCTTAACTAGGTAATAATATTGCAGCCCTTTCATATATATATATATATATAT | |
| | | | | ATAGTTTCTTTTGCTTTCATATAGTTTATATACATGAAAGATTCCATATATATTATAATTTGGAATTGTGAC | |
| | | | | AGTAAGATTTCATAATTTTTAACTATTTTAGTATAATAAATTTTGAAGAAATATTGAATAAGTTATATTAA | |
| | | | | GATTAATTAATAATATAAAATTATATTGTTACTGTATAATCATTAAAATTATCATTATTGATGTATAATAA | |
| | | | | GCCTGAAACATCGTTGATCTCTATTATTAT | |
| IGGY2357 | IGGY2357F3 | TGAACTT | | | 744 |
| | | CAACATT | | | |
| | | TGGTTTTT | | | |
| IGGY2357 | IGGY2357F1 | ACTTCGT | C | | 745 |
| | | CAGTAAC | | | |
| | | GGACCGA | | | |
| | | TTGAAAA | | | |
| | | GTGAAAA | | | |
| | | TTCGTCATG | | | |
| IGGY2357 | IGGY2357F2 | GAGTCGA | G | | 746 |
| | | GGTCATA | | | |
| | | TCGTCGA | | | |
| | | TTGAAAA | | | |
| | | GTGAAAA | | | |
| | | TTCGTCATC | | | |
| SY3121 | | | | CAATGTACAATTATATTATCTTTCAAGACATCAGGATTTTGGAATTGTTCTAGTTTAGAGGAGAAAAGTC | 525 |
| | | | | ATCTAGTTTATAACTACACTGTTTTTGAATTTTAGCATCTATCAATTTAAGTAATTATAATATTTGATAGAT | |
| | | | | GAATTATATAGTCAGTTATATTAATAGAAAGCAGAGCTTAAAAGGGACAGTAAAACAGAAAGTTGCAAT | |
| | | | | ATATTCACCAAAGACAACAGCCTTGTCCTCTCAACCAAC[A/C]ACCATGAATTCAGGTCCTAGCGAAGAC | |
| | | | | GGACACACCTCATGAAAATAAATAAAAAATTAAAGAAAATAAGTATCTTTAGTTCAGCAGTTAAGCTAAC | |
| | | | | CAACAAAAACAAACCAAAGTATAATCTCACACCAAAATATGTATAACATTGATCCAGAAAATGTCTTAAT | |
| | | | | ATTCCCATTTCTTCAACTCCATGCCATCAGGAGCACTTCCCTCNACCTTCTTTGANCCCACTTCTTTCCAGT | |
| | | | | TTGTAGACAGC | |
| SY3121 | SY3121F1 | TCACCAA | | | 747 |
| | | AGACAAC | | | |
| | | AGCCTTG | | | |
| SY3121 | SY3121R1 | CGTCTTC | | | 748 |
| | | GCTAGGA | | | |
| | | CCTGAA | | | |
| SY3121 | SY3121A1FM | TCAACCA | A | | 749 |
| | | ACAACCA | | | |
| | | TG | | | |
| SY3121 | SY3121A2TT | TCAACCA | C | | 750 |
| | | ACCACCAT | | | |
| SY3148 | | | | CGCTGCCAACACCTCCAAGGCATCATCGGATTCCGAGAATTTCGCTGAGTCGGTGATCAAGGCTCCTAA | 526 |
| | | | | GCAGGCCTCTGGGGAGCACAAGAAGAAAAAGAAGATCAAAGTGACNTTCCCATCAGGTCAAGAGCGG | |
| | | | | AATGCACCATCACAGGCAATTAGGAAATGCTTGCACTGTGAGATAACCAAGACACCACAGTGGAGGGC | |
| | | | | AGGGCCAATGGGGCCGAAAACACTCTGCAATGCTTGTGGCGTGCGCTACAAGTCAGGCCGGCTTTTCCC | |
| | | | | CGAATATCGCCCTGCAGCGAGTCCAAC[G/A]TTTTGTGCGGCCATGCACTCCAACTCCCATAAGAAGGTC | |
| | | | | CTTGAAATGAGGAACAAGACAGGCACCAAATCTGGCTTTGCAACTGTTTCTGCTGCCTCACCAGAACTCA | |
| | | | | TTCCAAACACTAACAGCAGCCTTACCCTTGAATATATGTGAAAGGGGGAAAGGAAGGATTCTAGTTGGA | |
| | | | | GAATTCTCTAATTCTCTTTCAAGTCNTCTCTTGAGTCATGTCTTATACAAGGTTTTGAATTGCATTCTACAA | |
| | | | | ACTGCAATGTTAAAGGTTTTAGAGGTGTCTGCANCTGCGTTGTGGTTGCG | |
| SY3148 | SY3148F1 | GCGTGCG | | | 751 |
| | | CTACAAG | | | |
| | | TCAGG | | | |
| SY3148 | SY3148R1 | GGTGAGG | | | 752 |
| | | CAGCAGA | | | |
| | | AACAG | | | |
| SY3148 | SY3148A1FM | CAGCGAG | A | | 753 |
| | | TCCAACA | | | |
| | | TT | | | |
| SY3148 | SY3148A2TT | AGCGAGT | G | | 754 |
| | | CCAACGT | | | |
| | | TT | | | |
| SY3005 | | | | ATGGATATTTTTTTAAGTGATCATTTATCTATTTGTAATTACTAAAAACATATTTAACTTATTTATTCCGTA | 527 |
| | | | | CGTCTGACCACATGCCAAATCAATTTGTTTCCCACAGACACCCACCACCACAATTCATGTGGATATGATGT | |
| | | | | GAAAGCGTGACATTATTATTTTCAATTATGATTACCTATTTAAATCAACTAGCCAAGTGATCAATAATATT | |
| | | | | GCACTATGGTCCCTCCTCTTGGGTAAGACCTGGTAATCTTACGGAAGTGTCTCACTTCATACATCTATTTA | |
| | | | | TTACACATAGCCTATCCTAAATCATACGTGGCAAGTTCTTACTGGACAGAATAGGTACTTAATGATATTTT | |
| | | | | TTGAGATATTCGATCTATGTTGGTAAGGGAAGGAAAACAAACAACTCATAAGCGAAATAAAATGGACAA | |
| | | | | AATGGATGCCCCAAGCCAATAGAAATTCAGATATAGATCTCGTAAAGATAAGTACCCCTCTCTTCTTTAA | |
| | | | | GCTATATATTGTGCTAAAAAAAAATATATAGGCATCACCAGTAGCCATTCTCTTCAGTTTNAAGTTACATA | |
| | | | | GTTTTTCATTGTTTTACTTAATCTACAATGGCTGCTTCAACAATGGCTCTCTCTTCATCATCATTGGCTGGC | |
| | | | | CAAGCTATCAAGCTTGCCCCCTCCACCCCTGAGCTTGGTGTTGGAAGGGTTAGCATGAGGAAAACAGCC | |
| | | | | TCCAAAACTGTTTCCTCAGGAAGCCCATGGTACGGCCCAGACCGTGTCAAGTACTTGGGCCCATTCTCAG | |
| | | | | GTGAGCCCCCATCCTATCTCACTGGTGAATTCCCAGGTGACTATGGTTGGGACACTGCTGGGCTTTCTGC | |
| | | | | TGACCCAGAGACTTTTGCCAAAAACCGTGAACTGGAAGTCATCCACTCCAGATGGGCCATGTTGGGAGC | |
| | | | | CTTGGGCTGTGTTTTCCCTGAACTCTTGTCCCGCAACGGAGTCAAGTTTGGCGAGGCCGTGTGGTTCAAG | |
| | | | | GCCGGGTCTCAGATATTCAGTGAGGGTGGGCTTGACTACTTGGGCAACCCAAGCCTGATCCATGCACAA | |
| | | | | AGCATTCTTGCCATCTGGGCCACCCAAGTTATCTTGATGGGTGCCGTTGAGGGTTACCGTATTGCTGGTG | |
| | | | | GGCCTCTTGGTGAGGTGACTGACCCAATCTATCCAGGTGGCAGCTTTGACCCATTGGGCCTTGCTGATG | |
| | | | | ACCCAGAGGCTTTTGCTGAGTTGAAGGTGAAAGAGCTCAAGAATGGTAGGTTGGCCATGTTCTCCATGT | |
| | | | | TTGGTTTCTTTGTTCAGGCAATTGTGACAGGAAAGGGACCCTTGGAAAACCTTGCTGATCACCTTGCTGA | |
| | | | | CCCAGT[C/A]AACAACAATGCTTGGGCTTATGCCACAAACTTTGTTCCCGGAAAGTGAAATGACTTGTGA | |
| | | | | ATTTTATGTTATTTAGTTAAATATGTATTGGATCTATCAAGTGAGAATGTGAATTATATTATTATATTTTAT | |
| | | | | ATATCTCTTTTTAGTTCATTTGGATGTATCTCCAAGGTTCTAAGTTTATATATATATGCACTTTATTAACCA | |
| | | | | AACTAATTAAAGCTCAAATGACAAGTCTTAAACATTAGAAGCGAGTTAGGTTCTAAAATTTAAAGCAGTG | |
| | | | | GGATGAAGAAGGAGAAGTAGAAATCACCAAGACATAAATACAAGTGCTTTAAATTTTGCATTTGATTCT | |
| | | | | CCTCATGTGGACCACAAATAATTTTCATCATAAGCTTGAGTAGGTTTACTCTTTTTAGGTTGACTTTCAAG | |
| | | | | ACTCTGGACTTTATTCTTCAAACTATATTAGTCAGTAAAATCAATTAAGCTTTACAAACTGCCAACTGATA | |
| | | | | ACTGTAAATTATTATTGTTCTAGTGAAACCAAAATGAAATATTTTATTTTACTCTGTTTCCTTTTTAATTAC | |
| | | | | ACTCTTTCAGTAAAAATAAAATATGCCATGTTTTAAACCTTGTATCCTTATTTTAATTTTTATTTATAAAAT | |
| | | | | ACGCCAGATATAAAACAGGACGTACATTCTGT | |
| SY3005 | SY3005F1 | CAGGAAA | | | 755 |
| | | GGGACCC | | | |
| | | TTGGAAA | | | |
| SY3005 | SY3005R1 | GTGGCAT | | | 756 |
| | | AAGCCCA | | | |
| | | AGCATT | | | |
| SY3005 | SY3005A1FM | CTGACCC | A | | 757 |
| | | AGTAAAC | | | |
| | | AAC | | | |
| SY3005 | SY3005A2TT | CTGACCC | C | | 758 |
| | | AGTCAACA | | | |
| SY4235 | | | | ACTGTAATCAAATGTGTATTGGGATTTACTGTACAGCTGGTCTGCAGACAGTAGACTTCTTTTAAGTGGC | 528 |
| | | | | AGCAAAGATTCAACACTTAAGGTAAGCATAATTTTCCTTTTCTCTCAAGAAGGGATATGTATCGAAAACA | |
| | | | | TTTTTAGTTTGGTTTATACACCTGAATACATCAATTTTCATTTGCTAAACTTGAACTGAGCTTTCATTATGT | |
| | | | | TTGGTTTTCAAGGTTTGGGATATTCGGACTCGTAAGTTGAAGCAAGATCTTCCAGGCCATTCTGATGAAG | |
| | | | | TATGCCTATTCACATGACAACTTGAGTGTTTTTTTTTTTCCTTTCAAATATTCTTCCGTTCTAGTCCCTGACC | |
| | | | | TAAGTCTATTTTCTTGCTGTAAAGGTTTTTTCGGTCGATTGGAGTCCAGATGGAGAGAAGGTAGCCTCTG | |
| | | | | GTGGTAAGGATAAAGTGTTGAAGTTGTGGATGGGCTAGGCTAATTTTTGGATGAATATTGGGAATCCAA | |
| | | | | CGAAGT[A/G]CAATCTCAATGGAGTTTTGCGGATGCATGGATTTCATGGAAATCAATGGTTGGTATTAT | |
| | | | | GTGGATGCAAGGTCTTTAAATTATATAGACAGCATAGAAGATATGTTTATGACTTATCAGAAATATTACT | |
| | | | | CTCATAGCAATTGAGAATATAGGCACTGGAAGAAGTTGCTCAAAGCGAGTCTCAGAACAGTGGTTGAA | |
| | | | | ATGTTTGGAGGCCTATCACATGCTTGCAAGATGTTTTCTTGTCTGCTTTGAAGTCTTTCTTGGTCTTCTCTT | |
| | | | | CCATTAATAGTTGTAGGTGGTATTGTTTTTCGGTGACAACAATGACTATAATGGGTTGAACTGTCATAGG | |
| | | | | GTTCATTGGTATGAACTCAGAAATTTTTGGGCAGTTTGACACACGATGATTTTTTGTTGGCCTTGCCACTT | |
| | | | | TAGTAGTAGTGTTTGAATGGAGTATTTTAATTTGAGATGTAAGAAAATTAAGCTGTGTCCTTTTCATTTTA | |
| | | | | TAAAATTGTGTTTGGATTG | |
| SY4235 | SY4235F1 | AGCCTCT | | | 759 |
| | | GGTGGTA | | | |
| | | AGGATAA | | | |
| | | AG | | | |
| SY4235 | SY4235R1 | TGAAATC | | | 760 |
| | | CATGCAT | | | |
| | | CCGCAAA | | | |
| SY4235 | SY4235A1FM | CATTGAG | G | | 761 |
| | | ATTGCAC | | | |
| | | TTCGT | | | |
| SY4235 | SY4235A2TT | CCATTGA | A | | 762 |
| | | GATTGTA | | | |
| | | CTTCGT | | | |
| SY4433 | | | | TTCTTGTTTATGAAGCTAAAATAACAAAAACAGAAAACATNAGCAACGTCAACCAAATTCATTTATAGCT | 529 |
| | | | | CTATTTTACTAGGTCTGTCAGAACCCTGATTCCATCATTATCTACACAAGAATCACATAATAAATGTCAAA | |
| | | | | GCAAAAGTAAACAACCTGACTTCACCTTATAATCCTTACAAGTTAAAATATGCAAATTAAGGCAATATTTT | |
| | | | | CAAAGATTTCAATTATTTCGATAAGAAAGCAATAATTAAAACCAAATCTCATAAAGGAGAAGCACAAGC | |
| | | | | ACCCATTAAAGAGTAACAATCATAAAAAAAGCAATAAATGACATGATCTATGAGAAAAACAATCAAATA | |
| | | | | ATAGTACAATACCATCATCATCTTGCTCCATTNCTTCTGGCTCATCCTCAGATGACGTCNAACCACCAGAT | |
| | | | | TGTCCAGTGCCTCTTCTGCTACTGGAGGCTACATCATTCAGAGCACTCCATATTGCTTCAGCATGCATCGT | |
| | | | | GTGATTTT[C/G]ATCATCAATACATGCATCAAAACTTCCTCGTACAGGGGATAGAGAACCTAGAAAAATT | |
| | | | | AGGTAATACATAGTCATTTTCAGAAGAAAAGTTGCTACACATACAATGTCTTTTTAAACTATAACAAAAG | |
| | | | | AGCAAGCCTGAGAATAGAACTTCAAAAAGAGCATCTCCACATACTTATCAACAGAGTTAGCTTAGTATAT | |
| | | | | ATGTTTTAGATTTACAAGTTTACAACCCAAACCATGCAGAGGGTCAACTAAAGAAGAATAAAAGCAATA | |
| | | | | TTATAGTTAAAAGTAGTAGATAAGTCTTAAAATAAAATCAGAAGATTATTTGTATACATAGCCATATACC | |
| | | | | CATACATGCAGACTTAATTAAATAGAAACATAAAGTTTAAGTGATCTTTACATACTGTCATCATCAATCAT | |
| | | | | AGGATGATATGGAGTCTTAGGCTCAGTAATTTTCTGCCTCACAGGTTTGTTTGCCTCAATTTCTCCAATAT | |
| | | | | TAGCCTCATCCCACCTTACAC | |
| SY4433 | SY4433F1 | TCAGAGC | | | 763 |
| | | ACTCCAT | | | |
| | | ATTGCTTC | | | |
| | | AG | | | |
| SY4433 | SY4433R1 | ATCCCCT | | | 764 |
| | | GTACGAG | | | |
| | | GAAGTTT | | | |
| | | TG | | | |
| SY4433 | SY4433A1FM | TCGTGTG | C | | 765 |
| | | ATTTTCAT | | | |
| | | CATC | | | |
| SY4433 | SY4433A2TT | CGTGTGA | G | | 766 |
| | | TTTTGATC | | | |
| | | ATCA | | | |
| SY4434 | | | | ATTGGCTTTAAGACTCTCCAACCCCCCCCCCCCACACACACACACACACAAAATAAAAATAAAAATCATA | 530 |
| | | | | ACTATAAACTACTAGCGCGTTTGGTTCCACATTTGTGATGCCATTTTCACAAGCTAATAGTTATATAGCTT | |
| | | | | CTGCATCCTCAACGAGTTTCCAAACAGGCAAACATACTATACTACACAAAACTATATATATATATAACAG | |
| | | | | ATAGAAAATGGGAAAAATAAAACCTTCGGGTTGGTCATTCTCGGAGAACTCCTTCTCGAGAACGCGATC | |
| | | | | GAACATCTTGGCCAAGGTGTTGTTGGATTCGGGCGACGAGCCATTGGGCATGTTCCCGTAGAACCTCTC | |
| | | | | CCGCGTTTCCTGGTCGGATCTGGCCGCGCCGCAAACCCTAGCGCAGATCNCGAGGCACAAAACGCAGC | |
| | | | | ACCAGAGCCCAAACGCGCGCCGTTTCTTCGTGGCCAGAATCGCCGTCTTCATCGTCGTTTCGATGCGAAG | |
| | | | | TAGCTGTGCGTGC[A/G]AGTTTCGGGTTTGTTTGGGAAATTGGGTTCTCCGCAAAACTGGGAAAAGGCA | |
| | | | | CAGAACACGGATATGGTAAGGAAGGAAGACAATGCAGAGAGGGAAAACGGTTTTTTCTGATTTCAGAA | |
| | | | | GTTTGCTACACTTTTTCTGGTTAGTTGCATTTGCGTTATAGCTGGTGTGAATGTCAATGTCAATGAAACTT | |
| | | | | TATTCATTTGACACTTTTGTCAAATGCTGAGGGGGGGTTTTGTGTAATTTCATTAATATTTTGGTGTCTGT | |
| | | | | GTGTTTTTTTTATAGGAATAATTATGAATGATTTTTGTATACAATAATTGTAGAAGTTAGAAATATTATGA | |
| | | | | TTTTTAATTGATTGATATTATATTATTTTTATAAAAAACTATGGTAATTTTTATAAAATTGAGAGTTTAATT | |
| | | | | TTTATGTAAAAAGTCTATTGTCATCATTTAATTAGAAAAATATTATATATAATATTTAAAGCTAATATAGG | |
| | | | | AAAGTCAATCATCTTTTTTATATA | |
| SY4434 | SY4434F1 | CGCCGTC | | | 767 |
| | | TTCATCGT | | | |
| | | CGTTT | | | |
| SY4434 | SY4434R1 | TTTGCGG | | | 768 |
| | | AGAACCC | | | |
| | | AATTTCC | | | |
| SY4434 | SY4434A1FM | ACCCGAA | G | | 769 |
| | | ACTCGCA | | | |
| | | CG | | | |
| SY4434 | SY4434A2TT | CGAAACT | A | | 770 |
| | | TGCACGC | | | |
| | | AC | | | |
| IGGY3105 | | | | ATGCATTAATGGTAATTTCAATTAGATTAAGAAAGTATAGTANATTCTTTTGCATGTTGGGATCTGATTTT | 531 |
| | | | | GAGATTTCAAAGACAAACTCAAACTCCTATNTATTCAGTGAGAGGAAGCTGATATGCTNTATAATTCTCA | |
| | | | | GGCATTGAGGACTGAATAGTTGAAACCTGAAACATGANNCATAATTNATGAAATGTGTTGGTCATAGG | |
| | | | | GTTTAGTAAGAGCAGACATGATTCCTTGGAGTACAATATTCTTTTCTATTACCATAAATTATGTGTTCACG | |
| | | | | ATTTCTTCTTCCCAAGTAAA[A/G]CAAACTAATAGTAATGTAGCTCCTTTGTGCTGCTTCTAATTAATTGC | |
| | | | | ATGCCAAAGTTTGTGTTTTGAACTGTTGTTGAGGNAAAATAAAAGNCCTGGTATTTCTAGACCAATTTCC | |
| | | | | AAGGAAAATGTGTATTTTTCACCAAGTAGTCTCTTGTTGAAGCTCAAGTGAAAAAATGCCAATTTTATAT | |
| | | | | AAATCACCACCAAAGCATCTNCTGCAGTATGAAACAAANATCAAATTATCATAATATCCTTTTTGCCTGA | |
| | | | | AAACTCCATGGTTAAAAGTAAAGATATTAATAAATGAAAGGAA | |
| IGGY3105 | IGGY3105F3 | AAACTAA | | | 771 |
| | | TAGTAAT | | | |
| | | GTAGCTC | | | |
| | | CTTTG | | | |
| IGGY3105 | IGGY3105F1 | ACTTCGT | A | | 772 |
| | | CAGTAAC | | | |
| | | GGACGTC | | | |
| | | ACGATTT | | | |
| | | CTTCTTCC | | | |
| | | CAAGTAA | | | |
| | | AA | | | |
| IGGY3105 | IGGY3105F2 | GAGTCGA | G | | 773 |
| | | GGTCATA | | | |
| | | TCGTGTC | | | |
| | | ACGATTT | | | |
| | | CTTCTTCC | | | |
| | | CAAGTAA | | | |
| | | AG | | | |
| SY3889 | | | | TAATTAATATCATTAATATATATTTATAAATTTTAAATTAAAACACAAATATTTACCAAACAGTTACTCTGT | 532 |
| | | | | CAAAGCTGACATTTCAGTTAGTTCCTTGGGGATTGAATGAGAAAATTTGTTATTTGAGAGATCCAAGACT | |
| | | | | TCCAGGCTAACCAAATTATCAAAAATTCGGGGAATATAACCACTAATGTGGTTGCCACTAAGATTCAGTG | |
| | | | | ACACCTGCAGAATCCACGGCATGCTTGGTATCACACCACTTAGCTGGTTTTCCCCGAGTTGGCGTTCNAT | |
| | | | | TAGAAGTTTCAAGTTTTC[A/G]ATGGATGTTGGTATGNAACCATTCAGATTGTTGCCTTGCAAGTTCAAC | |
| | | | | AAAGAAAGACTGCTCAAACTTGAAATCTCAGATGGAATTGATCCACCCAGAGAATTGCAGCTCAAATTC | |
| | | | | AGTATTGACAACTTATGAAGTTGGCCAATTTCAATAGGAATTGCACCATTATGCTTGTTCATTTGAAGCTT | |
| | | | | CAAGACTTGAAGATTGGCAAGATTACCTAGCAATGGTGGCAATACACCAGTCAAGTGATTCCAATTTCCT | |
| | | | | GCAAGATTCCAATTCAACCAGTATGGTTCCGGTCAAGTCATT | |
| SY3889 | SY3889F1 | GCAAGGC | | | 774 |
| | | AACAATC | | | |
| | | TGAATGGT | | | |
| SY3889 | SY3889R1 | TCCACGG | | | 775 |
| | | CATGCTT | | | |
| | | GGTATC | | | |
| SY3889 | SY3889A1FM | CCAACAT | G | | 776 |
| | | CCATCGAA | | | |
| SY3889 | SY3889A2TT | TACCAAC | A | | 777 |
| | | ATCCATT | | | |
| | | GAA | | | |
| IGGY3103 | | | | GGGCCATTTTCCAGCTGACAAGATCTTGACGTGATAAAGGACTGCAGAAATTAATATAGGAGAGAAGG | 533 |
| | | | | GAGNTCACAATTGTAGCCNACGCCATACAAAGTTAAAAGCACATCTCAAACAGAGGGTAGTGCAACTGT | |
| | | | | GCACTGAGAAAAATGAGATGAAATATTAAGTCTATTTTTCTATATAAAAAAAGGAGAATTGCAAAAATTT | |
| | | | | TGAACAACAAATGCACAACTGCAGAGGTTAAAAAAATGTAGCCACAAATTAGATATCCAAATTCAGACA | |
| | | | | AAACATACCTTTCAGGGGAGAAGT[G/A]AAATGGGCTATCATCTCCATCACCAAACAACTGTATATCACG | |
| | | | | TCTTGAAAGCCTGCTTTCAATAAGTCCAGCTTCTGCCAAGCCTGAAAATCAATATTTGATATTATTTAGAC | |
| | | | | AGAATATGAGTATAGCAACAAGTTGTATTGTTAAAAATTATTATGATGTCCTGTACTGACCTTGAATGGA | |
| | | | | AGAAAAATCAGGGTCCTCGGGAGTGACATCATCAAATGCAAGCTCAGTAGCATTGTCTATNTACATGGC | |
| | | | | AGGATACACTTTTGAAACTGTGCTCCTAACAAGTTACCAGAAAGGCAC | |
| IGGY3103 | IGGY3103F3 | CTTCTCCC | | | 778 |
| | | CTGAAAG | | | |
| | | GTATGT | | | |
| IGGY3103 | IGGY3103F1 | ACTTCGT | A | | 779 |
| | | CAGTAAC | | | |
| | | GGACGG | | | |
| | | GTGATGG | | | |
| | | AGATGAT | | | |
| | | AGCCCAT | | | |
| | | TIT | | | |
| IGGY3103 | IGGY3103F2 | GAGTCGA | G | | 780 |
| | | GGTCATA | | | |
| | | TCGTGGG | | | |
| | | TGATGGA | | | |
| | | GATGATA | | | |
| | | GCCCATT | | | |
| | | TC | | | |
| IGGY3106 | | | | ACACCTCATACCAAGCATTAGACATGGTTGTTTCCTGTGAAGAGTGCCAATAACAGCATACAATAAAGCA | 534 |
| | | | | TGGAAGTAGTGGGAACAAATTAATCAGCATTCTTCAATATAGAAAGTAACTTCCACGTCAAATTCAGAAA | |
| | | | | CATGTATGGACTTTAAATAGAAAANCTGATTACCTCTTTGTCATCCTCTTGATTCACCCAAGTAAATTGTA | |
| | | | | CTTTATACTGTAAATGGCTTCCTGCACCATAAACACAAGCAATAATATTTGATACTTGTCTTGCAGATAGC | |
| | | | | ATACATCATATACAAATG[G/A]ACTAACACAAGCTTTACCATTCTTAACTAATCCCAGAACAACAGGCAA | |
| | | | | GTAATCCTCAAGAGCCTGCAGAAGGTCAGCCAGTGTTGAACCTCCTGCAGAAGAAATCAAACGATGCCG | |
| | | | | ATGCATCAATNAATTAGAGTAACTTATTCATCATAAAATCATGTTGTTGTTGGTAAAACTAACCATGCTG | |
| | | | | AGTTTTTCTTTTTGTTCTTGTAATTGTAGGACCTTCTTGACCAGCCATTACAACTATACGCGTTCTAAGAGC | |
| | | | | AGACAGGCGTTCCACTATATTCTTGGACAAATAATCACCAA | |
| IGGY3106 | IGGY3106F3 | CTAACAC | | | 781 |
| | | AAGCTTT | | | |
| | | ACCATTCTT | | | |
| IGGY3106 | IGGY3106F1 | ACTTCGT | A | | 782 |
| | | CAGTAAC | | | |
| | | GGACGTG | | | |
| | | CAGATAG | | | |
| | | CATACAT | | | |
| | | CATATAC | | | |
| | | AAATGA | | | |
| IGGY3106 | IGGY3106F2 | GAGTCGA | G | | 783 |
| | | GGTCATA | | | |
| | | TCGTGTG | | | |
| | | CAGATAG | | | |
| | | CATACAT | | | |
| | | CATATAC | | | |
| | | AAATGG | | | |
| SY0871AQ | | | | AGAGGAGGTACCGAGGCCACCCCCTCCGGTCATTTCCCGGGAACCCGAACCAGATCTGGGTGGTGGAG | 535 |
| | | | | ATCCACGTTCTAAAGTTGAAGACGATCTAGATATCGGTGAAGACCTGTTAAAGATATCACAGCGTCGGA | |
| | | | | ATATTGA[A/T]GAAATTGACGAGGACATCCGGAGCAGAGGAAGCAATGGACCTCCCCATAATACTTCTG | |
| | | | | AAGTAGATTCAGTTTTGGGTTCAGATCGCCGGGCCCCAACAATTCGATCTGAAGCAAGGCACTCAAGTG | |
| | | | | AGGGAAGAAGTGAAAGCTGGGAAATCGGGTCTGAGGTCCTTGCCAATTCAACTGTAACTGAAAGCAGA | |
| | | | | AGCTATGTTGTATCAAAGGAGGTGCGCCAAAAACTTGGGGGTTCTTTCTGAGATGTGGGGTTTCTTAGA | |
| | | | | TATTAAAAATGGAAAAGGAAATGGTGTTTGATCAGATTATAGGAATGGGAATTGAATTGATTGAGGCAT | |
| | | | | TAAGTACAAAACTTATTTGATCTTTTTTTGTGGTAAGGTTAGCTCTTTTGG | |
| SY0871AQ | SY0871AF1 | GAGGTCC | | | 784 |
| | | ATTGCTTC | | | |
| | | CTCTGCT | | | |
| SY0871AQ | SY0871AR1 | TGGTGGA | | | 785 |
| | | GATCCAC | | | |
| | | GTTCTAA | | | |
| | | AG | | | |
| SY0871AQ | SY0871AA1FM | CTCGTCA | T | | 786 |
| | | ATTTCATC | | | |
| | | AA | | | |
| SY0871AQ | SY0871AA2TT | CTCGTCA | A | | 787 |
| | | ATTTCTTC | | | |
| | | AA | | | |
| SY0099E | | | | TAAAATTTGTTAGTTTGTGGTGTTGCAAGGATCCCCCCTACATAGGGTGATTGGTTGCTGAGACATCACA | 536 |
| | | | | AGGATTACCCTAAACCAAACAGTTTTTTCTAGTGGGTCTTGGACTCTGACACTGTGGCTTTAGACAATTA | |
| | | | | AAATAAATGTGTTTTAGATTGTTCGTTTTCCATTATAATTGATCTTAGTCTTTATACCTTAAAAAAGATGGC | |
| | | | | CTATGAAAGTCTCCTATTGTTTTAAATAAANAAAAAATAGGCATANTACAATTATTAGTTTNAAAATATA | |
| | | | | CTACAGACTAAGAAAATTTTCCACCAAAAATTGGGGACCATAACACATTTTANCAAGAGAAAAAAAATA | |
| | | | | TATAATTAAATTGACTTAAACAGCGGTTAAGAGACAGGATTCAGAGGAAAGATGAACCAACTGAAAGC | |
| | | | | ATACCTCATGCATGTGCCACAGCGAAGCATGCCAGAGAGCCCTATGAGCCCATCTAGCCCAAAATTCCAT | |
| | | | | ACCCACCTGAAAATCAGACATACCCAGTTGAATACTTGAATCTATCACTCAAAATTCACAAACAACTCACC | |
| | | | | CAATTCTGAACTCAAAAACCATTCAAAACCCGTTTGGAATCATAATTAGTTTAAAGGATAACTCACAGCA | |
| | | | | GCTCCCACTGATAGAGCAAATGTGCCAAACATTTCAGACCAGGCATTTCTCCACCCTACACCAACCAAAC | |
| | | | | CCATTTCATTATAAAATTATCTTCATATGCAAATCATCATCAATCAATCATGCATGACACCAATGTCAGGA | |
| | | | | CATAAAAAATAAGGTTTTAAAAAACGATCCGCAAAATAAAAGTCAAGTCTTTGTGGTGTCTGTCATTCCA | |
| | | | | ATTGTGGCCGCATCACCAGCGTTTGTTTATAATTTTCTATGATATCCAAGATCACAACTGTGGTCGTATCA | |
| | | | | GCAGCATTTGTTTATAACCGCGACAAAACCACGACCAGAGCCGTTTTTTAAAAAACTTGCATAAAAATAA | |
| | | | | GAAGAAAAAAGAAAGAATCAATTTTAAGGCACCACCTACCTCCATTTGCCACGAGAATCTGCAATAAAC | |
| | | | | AGCGAACACTGCCATGGATGTGATGCCGAAGCTAGACATGACAGCAGCAAC[A/G [symbol] AGGTAAGTGAACC | |
| | | | | TCTCAGACTCTTTTCTGGCCANTTTCTCAGCCAACTTTGGTGACAGAACTTGTTGAGCGGGAGGAGGAG | |
| | | | | GAGGAGGAGGAGGTTGTTCTTGTGGCTCAATTTCCATGTGGGTGCCTTGTTTTGGGTCCTGCATGAGGA | |
| | | | | CACAAACGGTGAAAGTTGAAACTTTTTGGGTTCTTGGTGATGCTGTGTGGTGGAAAATTCTCATGAGAG | |
| | | | | GGAAAGGGAGTGTTGTTGGGATTGATTTGGGGATCTTCAATGGAGGTTGGTGGAAACGGAGGAGGGA | |
| | | | | CTTCATGGTTATGGC | |
| SY0099E | SY0099EF1 | TGTGATG | | | 788 |
| | | CCGAAGC | | | |
| | | TAGACATG | | | |
| SY0099E | SY0099ER1 | CTCAACA | | | 789 |
| | | AGTTCTG | | | |
| | | TCACCAA | | | |
| | | AGTT | | | |
| SY0099E | SY0099EA1FM | CAGCAAC | G | | 790 |
| | | GAGGTAAG | | | |
| SY0099E | SY0099EA2TT | CAGCAAC | A | | 791 |
| | | AAGGTAAG | | | |
| SY4353 | | | | AAATTTATAGTGCAGCCAAGGCATCCGAAAGGTCCCCTTAAAAACCGGTTCATAAGGGGGTGGTCTACC | 537 |
| | | | | TAGCTATATAAGCACTTATCATGTTCATGAATTACCCGATGTGGGACTATTCTTAACACGCCCCCTCGAGC | |
| | | | | CAGGGCTCGTCACCACAAAGCGAGGGCTGGCGGCACCCACTGGACAGAAGTAGAAGATGGCTCTGATG | |
| | | | | CCATATTAATGAAACGAAGCAGCGTGAAGAAAAGATACGTAATCAGTGAACGTAAAATGATCAGCCTCA | |
| | | | | GCTTGCTTGTTTATTCATTAATAGTGGAATTTATATACATCTGCAGCATGAAGTTGTTATAACCGACTAAC | |
| | | | | TAATCTAACCAACTCTTTAACTACTAACTGAAAAGTTGTTATAGCTGCAGTTATACTGTTAACAGAAATAC | |
| | | | | TTTACTAAAACTTCCTCAGGCCTCATGATTGTCTTTTAGGAGTGGAAGATACGGGGAAAAAATGACATG | |
| | | | | GCTATTTACTGC[A/G]TTAGTACATCATGAACAGCCGGGTAAAATTTAATGGTGTTTCGTTTCAGGTTTA | |
| | | | | AGAATTAATTTTAGGTCTAAAATTAATTTTAGATGAATTTTTATATATTTGATTTCATTTAAAGAAAAATTT | |
| | | | | AAAATTAATTTTGATCGAATGAGTTGAAATAACTTTTACATTGGATAAAAAAAGTTATACTAAATTTTAAT | |
| | | | | TATAATTATTTGTAAAAAAATATTTAATTGAATAATTATGGTTTTATTATTATGAATGTTAAACAGGCATT | |
| | | | | GATCTGGTCTTGTTAATTTATAATGATTTGAAATTAATTTTGACATATTTAAAAATATTTTAAAAGTTAGA | |
| | | | | CCTGAAAATTGACTCAGATTATATTTTTAGTCATCTTAATCAAATCAAATATCATATTCATTTATAATATAT | |
| | | | | ATTTTTAATAANTATATATTAATAATAAAATTCTAACTTAATACTTTGTGTGATGATATTGCATTTATATTA | |
| | | | | TCATTGNTGTTNTTGTT | |
| SY4353 | SY4353F1 | CCTCAGG | | | 792 |
| | | CCTCATG | | | |
| | | ATTGTCTT | | | |
| SY4353 | SY4353R1 | CACCATT | | | 793 |
| | | AAATTTT | | | |
| | | ACCCGGC | | | |
| | | TGT | | | |
| SY4353 | SY4353A1FM | CATGATG | G | | 794 |
| | | TACTAAC | | | |
| | | GCAGTA | | | |
| SY4353 | SY4353A2TT | TCATGAT | A | | 795 |
| | | GTACTAA | | | |
| | | TGCAGTA | | | |
| SY4354 | | | | TGTTATCGGCTCTGTAGCGGAAGTTCTCATAGGTAGTCTGCAAAACAAGTTATAATCAACCAGGTGATG | 538 |
| | | | | AAGATATTCTTGAAACACAAGGGCTCTTAAGAATCAAAGTTTCAGAATATGGTTTTCTATAAAATTTAGC | |
| | | | | CTTTTCTTGCATACTATGGAAAGCAACTAAAAGGGATGCCTTTCTTCTCGCATCTTGGTACAAGCGAATC | |
| | | | | AGGCTTACACTATTAATGCAGTTTGGATTGAGGGAAGAACACACAGAATTACCGACCTTGTGAGATTTA | |
| | | | | AAATTACTATTTGTTTGGATGAAAGGAAAAGTATGAGGGACAAAAATGAGTTTAAGATTCTAAAGTTAT | |
| | | | | CTTCTCAAAATTTCTTTCCTTTCCATTGCCTGATTTTTGGCTACCTTCAAGTACAACCATTNAGTATTTTTTA | |
| | | | | ATGTCCAGTTTTACTTCATCATTTTGTCCACATCCACCCAACATGAAGTCATAAACTAAATTTCCTATAAAT | |
| | | | | AAGGAACC[A/T [symbol] IGGTGAATTTAGAAAATTAAAATATTTTTTAGAGAGTGGTTCCAATTTAATTTCACCGA | |
| | | | | GGATAATTCTACTAATGCTTTTTATTCACGTAACCAGTTAGTCTTCAGGTACAATGAACAATGAGATAAA | |
| | | | | CCAGATATTATATTCAGAAATGTAAAAGATATCAACTGACCTGATTTGTGCCAATAAGGTACAAATGAAA | |
| | | | | GCCAGTTAGTCCACCGACAAACCACAAAGAGATGAAACAATATGCCATTAATATAACAGATGCAGGGGA | |
| | | | | TTCTTTCATTGCCTTCCAAACTGTCCCCTTATAATGATCCATCAGAACCTTGATGTAAAAAGCTGAGATGG | |
| | | | | AAAACACATAGATACATAGAATAGTTGCCGAAGAAACAAACAGAAAGAAGTAACGGTAGTTCCTCTGCA | |
| | | | | AATTGGAAAAGCCATAAACAAATAAATAAATTACAAGAAACACGTGAGCAAGCCAGGAACATCAATCG | |
| | | | | AACAAAGCAGTTATCATAACATCAA | |
| SY4354 | SY4354F1 | CCACATC | | | 796 |
| | | CACCCAA | | | |
| | | CATGAAG | | | |
| SY4354 | SY4354R1 | CCTGAAG | | | 797 |
| | | ACTAACT | | | |
| | | GGTTACG | | | |
| | | TGAA | | | |
| SY4354 | SY4354A1FM | CCTATAA | A | | 798 |
| | | ATAAGGA | | | |
| | | ACCAGGT | | | |
| SY4354 | SY4354A2TT | CCTATAA | T | | 799 |
| | | ATAAGGA | | | |
| | | ACCTGG | | | |
| SY4329 | | | | ACATGTTTTCCATACATACAATCACCACAATCACAATTCACACATCATTTTATTCCATCCTCATCTCATGTTT | 539 |
| | | | | TACATCTAAAACAACAAATAACGTGTGTATATATCATTATTGCATTATCTCAAACTTGTTTAACCCGATTT | |
| | | | | ATTTTATCTTTTTCCAAACATGCCAACTTGTTGAATAAAACATGCACAATCATTGACATGTATTAAGTATTC | |
| | | | | ATTATTAAGAATTCATCCTTCTTTTCATCCTGCCACCTAGTGCAGGAGAACATCATTCTTGAATCTTATATA | |
| | | | | GCATGCATATAACACTTCATTTTTTTCATTTTGTTTAAACTAAGAAATTTTCATTTTCCAAAATCATATTATC | |
| | | | | ACTAGGAAGATTTCAATAAACTGAACATGGTCATTACTCTTTAGTCACATACTCACATACCAAAATTGGCT | |
| | | | | ATAAAATAGTGCTACAACTACACCTACACCACCATGGTTCATNATTAAGCCATTCATTACACAATAGC[A/ | |
| | | | | C]TTTTCTACACTAGTGAAAACATTTTGTGTGTTTTATCTAAATCATTTTTTACTTCAACCAGTGACAGAAGA | |
| | | | | AGCCCCCACCTCCACAACTACAACTGTAACCGCCGTCACTGAAAACCCACCAGGAGGTGGGGAAAGGA | |
| | | | | GGAGAAAGTACAGAGGAGTGAGGCAGAGGCCATGGGGAAAATGGGCAGCAGAAATCCGTGATCCACA | |
| | | | | CAAAGCAGCAAGAGTTTGGCTAGGCACATTTGACACAGAAGAAGCAGCAGCAAGAGCCTATGATGAAG | |
| | | | | CTGCATTGAGGTTCAGAGGCAACAGAGCAAAGCTTAACTTCCCTGAAAATGTAAGAGCAGTTCCACCCA | |
| | | | | TTCAACCTTTTCAAGCCACCACTAGGCTAACCGTTTCTGATTCCACCACCTCTCAATTCCGGCCACTCTCCG | |
| | | | | CGGTGGCGCCACCCTTCATTCAGCAGCCACAGATTCAGGGCTCCTCTGACTTGATCAGAGACTACTTGCA | |
| | | | | ATACTCTCAGCTTCTA | |
| SY4329 | SY4329F1 | AGTGCTA | | | 800 |
| | | CAACTAC | | | |
| | | ACCTACA | | | |
| | | CC | | | |
| SY4329 | SY4329R1 | GGGCTTC | | | 801 |
| | | TTCTGTCA | | | |
| | | CTGGTT | | | |
| SY4329 | SY4329A1FM | TCATTAC | A | | 802 |
| | | ACAATAG | | | |
| | | CATTTTC | | | |
| SY4329 | SY4329A2TT | CATTACA | C | | 803 |
| | | CAATAGC | | | |
| | | CTTTTC | | | |
| SY4349 | | | | TTGTGTTATTGTCATATTCTCTGGAATTCATGTTGGGATTGCTTGTATTCTGTAGGTCATGCTGAAGCTGT | 540 |
| | | | | ACTAAGTGTTGCCTTCAGTCCTGATGGGCAACAACTGGCAAGTGGTTCTGGTGATACCACTGTTCGATTT | |
| | | | | TGGGACTTGACCACTCAGACACCATTGTACACTTGCACAGGTTTGACATTTAAAGATAATAAGTTACTCT | |
| | | | | GTTATCTGCTAATTAAATCAAGAAAAACTCAATTGATGTTTTGTTATCCTTCTCTTAGTATAAGAATAAAA | |
| | | | | ATGATCAATTTAACTCATGCAAAACAAAGTCAGAATTGTTGGAAGTTGGTAATGCTCATGTTTGTGTTGC | |
| | | | | TAGAAAAAAAAATTCTCAAAGTTAGAATTGTTGGAAGTTGGTAATGCTCATGTTTGCGTTGCTAGAAAA | |
| | | | | AAAATAATTCTCGATAGTTTGTGTAATCTGTTAATACCCAGTACTATGCTACAAGGGAGGGGATGAGAA | |
| | | | | TCAACATGTG[A/G]GTAAGGAGAAAAAATGGGAAATAAAGGGAATGTTCATGCTATTAAATCTTGGGC | |
| | | | | ATAATCAAATGCTGAGATGGCAAGGAATAGTGGGAGGTGGGATAAGAGGGATATATAGGGAAGGTGA | |
| | | | | AGGCAGGAAATTATAGCATAAGAATTTTAGAGTCATATATAGCATTATAGCTGTTTACATTTTATGCAGG | |
| | | | | TCACAAGAACTGGGTCCTTTGTATTGCATGGTCACCAGATGGAAAGTATCTTGTAAGTGGGAGCAAGAC | |
| | | | | TGGAGAACTTATTTGTTGGGACCCNCAAACTGGAAAGTCATTAGGCAATCCACTAATTGTAAGATCTTCA | |
| | | | | ACCTTGAATACCAATTTCTATTAAAAAGCTTGTTTTGTTTTTTCCTCTTAATTTTACATATCATGCCAAACTT | |
| | | | | CCAAGTTCAAACATTCAAAGATTCGAACAAAGATTTATAGAAACTTGAAGCTCTGAACACTGAATAGTCA | |
| | | | | AATGTGGTTATGAAGATTGAAAGCAGT | |
| SY4349 | SY4349F1 | CTGTTAA | | | 804 |
| | | TACCCAG | | | |
| | | TACTATG | | | |
| | | CTACA | | | |
| SY4349 | SY4349R1 | CTCCCACT | | | 805 |
| | | ATTCCTTG | | | |
| | | CCATCTC | | | |
| SY4349 | SY4349A1FM | TGAGAAT | A | | 806 |
| | | CAACATG | | | |
| | | TGAGT | | | |
| SY4349 | SY4349A2TT | AGAATCA | G | | 807 |
| | | ACATGTG | | | |
| | | GGTAA | | | |
| SY4358 | | | | TATTAAAATTTATAAAATTATGTGCCACGGTAAACTGAAGAATATGTAACTTTGTGTGCACAAAAAAAAA | 541 |
| | | | | TTAGAAAAAAAAGGAAGTTGAATTATTTTAAAAACAAACAAAGATCATAATGACTTAATATAAAAAATTA | |
| | | | | TTTAATATAGTTAGTTAAGGTTACTAACTTAAACAAAACAAAAACATTAAATATATTTAAATGTTTTGCAT | |
| | | | | TGGCTGAATCATTAGTTGGTTTTCAATTATGGAAGGGCCAAAGATCCAACATAGCATGTTCATAATCTCC | |
| | | | | CTTATACGCTGGCAGTGCATTTTATTCTCAAAATGCAACGGAAGTATTATCATATATAACCATAGCTTAAT | |
| | | | | GCCACGATGTTGTTAAAAAGTAGTTTAGTGCAATAGGCCATATTTATTTATTTATTAAAAATGGTTATACC | |
| | | | | TGATGGTTAATTGAAATACAATGATAAGGATTGGTATAATTTCATAAGATACTGATAGAGTGTATCTTAT | |
| | | | | AACTTAC[A/C]GTCGTACAGGATTTGCTTTCACAATGAGTGTTTGCTTGCACTTTTGAAGGCCGATGGTC | |
| | | | | TGGTGGCTAGGACATTGAGAGGANTGAACTTCTCTTTATTATGCTCTTTGCTAAGGAAACCATAATAATG | |
| | | | | CACTGTTATGAGGGCCAAATCAGTATAGCATATGTGTATGGTAATTAAATTATAAAACCAAAAAAATTAA | |
| | | | | TCCTTAACAACTGCTCATCATTTCGAACTTTGATGTTAAGGATAGGTCAAATTTGTTCCTTACTTGGGCAA | |
| | | | | ATAATTATCATTTTGGTCGGTTATTCTCAAATATATATATATATAATTATTTTGATCTCTAATGCACATCAA | |
| | | | | TTAATTTAAGTTTTCTTTATATTACACATCAATCATTTTGGTCTGATAGTAGTCTTCAAATTAANTTATCAA | |
| | | | | ATTAATAATGATAGTATTCTAGATTTGATTAATTCTTTAGTCTCCCTAATATATATATATATATATATATTG | |
| | | | | CAGTGAGATGAAGG | |
| SY4358 | SY4358F1 | CCATAGC | | | 808 |
| | | TTAATGC | | | |
| | | CACGATG | | | |
| | | TTG | | | |
| SY4358 | SY4358R1 | ACCAGAC | | | 809 |
| | | CATCGGC | | | |
| | | CTTCA | | | |
| SY4358 | SY4358A1FM | AATCCTG | C | | 810 |
| | | TACGACG | | | |
| | | GTAA | | | |
| SY4358 | SY4358A2TT | TCCTGTA | A | | 811 |
| | | CGACTGT | | | |
| | | AAG | | | |
| SY4324 | | | | TGGATGATGATGATTCTCTAGAAAAATTCAAACTAATCAGTTTTGAGCTAAACTCATTCATCTTCTCAAAA | 542 |
| | | | | AACCCACTTTCAAACCTTAACATTAATCATGACTTATTCAAGCTCATTAGTGATGAGAACTCATCAGTGTT | |
| | | | | GTTGCATCGTTTGAAATCAATGAGAAAGAAGTTGGGAAGGAAAGTTAAGCTAATGACATATTTGAAGA | |
| | | | | AAGCATCAGAAATTTGTGTTGCAGTGTATGACTTAGTGGCTATCACTGCCAATGTTACAGCAGCACATAC | |
| | | | | TTTAAGCACACTAATCATGGGGCCAACAATTCTCAACTTTCCATGCAAGAGTCTTAATAAGAGAGAGCTT | |
| | | | | CCACACTTGAGGTTTTCAAGAAGAAGGTTTCTTAGTAATGTTTGTGATCAGCTTGATATAGCAGCCAAGG | |
| | | | | GAACTTATATATTGAATAAAGACTTTGATACAATGACTAGAGTTGTGGCTCGGCTTTATGATGAAATTGA | |
| | | | | ACATAAAAGG[A/G]CAATGGNGCAATTCTTTTTGGACAAGAAGGATGATAAATTCTCTTTGCAAATGGT | |
| | | | | GAAGGAGCTTAAGAAAAGTGGTGATGGGTTTAGGAAACAAGTGGAAGAACTTAAAGAGCATGTGTACT | |
| | | | | TGTGCCTTGTGACAATTAACCGAGCAAGATGTTTGGTTACTGAGGAAATGACAAAAATGTGTACAGAAG | |
| | | | | GCATTGGGAGTGTAGACATGTAAATTATTATAAACGTATGGATCTTGTATAGTGTGGTTAAGATTTGTTT | |
| | | | | TGTTTTATTTAAATTATTTATTACATTAATTAGTGGAGGTACAGAGAGAAAAAGGTGAAAGTAGCCATGA | |
| | | | | CAATAAAAATTATCATGAGTTTCACTCTGTTCAGACTTAGATGGTAAAAACTCACTTTGAATAAGATTGTT | |
| | | | | GGGATCAATTTTCTTCAACATTAGAAACCGGGGTCTGGTACGTAAGTAACTACCTGCCCCAATATATATA | |
| | | | | TATAGAGACGACTTTCCATTAAAGAGA | |
| SY4324 | SY4324F1 | GTTGTGG | | | 812 |
| | | CTCGGCT | | | |
| | | TTATGATG | | | |
| SY4324 | SY4324R1 | ACAAGGC | | | 813 |
| | | ACAAGTA | | | |
| | | CACATGC | | | |
| | | TC | | | |
| SY4324 | SY4324A1FM | TTGAACA | A | | 814 |
| | | TAAAAGG | | | |
| | | ACAATGG | | | |
| SY4324 | SY4324A2TT | TTGAACA | G | | 815 |
| | | TAAAAGG | | | |
| | | GCAATGG | | | |
| SY4234 | | | | ATATATAGTGTTGAACCTTGCTCCCTGTTTGTTGCGGAATTTTCTGCGAGTGGTACAAGAAACGGCGTTA | 543 |
| | | | | GGGTTTGATCTGGCTTGGTGAGAGGTAATCGTATATAGTGTTTCGGTGGAAACCAATGGATTCACCGAT | |
| | | | | GGGCTTTATCTTTGGGCCGATCAAGTAGCCCAGGACCTTTACTTATTGTAAAAAATAATTTGAATAATAA | |
| | | | | AAAAATTAAAAGATACCCGCACATAATCCTTTTAAATAAATTCATATAATTACTAAATTTTAATCCTGACA | |
| | | | | TTGCCTAAAAAAAAAAACCTTTAATCCTGACAAACATTTAAGTTTTTATAATTCTTGAATACGTTGATTTTT | |
| | | | | TTTTTTCATTATTTACTCATATATGGTCGTGCTTTCATATTGGTTCCTTTAAATATTATATATTTAGCATTTA | |
| | | | | GGTGGGACTTTATATTAAGACTTTATAAAACTTAAAAAATAAGCACAGTTTTATTTTACAGTAAAAAAAA | |
| | | | | AGAAA[A/G]AAGCACAACTAATGCCTTAAAAAAACCCTTTGCACACTCGCAAATTAATGATGACGCTCCC | |
| | | | | AGCATAATAAAGCCAGAAACAATCTGAAGATTATGCTCACCATAGCAACTTCCTCAACTTCCCACATCCA | |
| | | | | AAATTAATGAATTACTCTATNGCATTCATCTATTAATCCCGTTAACAATTTATAAAATAAAAATATAAGAG | |
| | | | | AAATACATGTGAAAAAAATAAATAATCTTTAAGATATTTCAAACAAACATTTTTTCTTTTCTTTTCAAAACC | |
| | | | | TCTTTTTAAAAAAATATTAAAAATACATCTTATGAGAGAAAATATTTTAATAAAAAAATGATTATATTTGA | |
| | | | | ATCGTATAATCATTTATGAAAAATTAAAATTTAATGTCTAAAACTCATATAATTTTAATAAGTGATTACAT | |
| | | | | GATATTAAATTCTAATTATTCATATTTGATTAATTAATGATTACTTTCATATAACATTTTTTTCTCATATGAG | |
| | | | | GTCAATTATCC | |
| SY4234 | SY4234F1 | GGTCGTG | | | 816 |
| | | CTTTCATA | | | |
| | | TTGGTTC | | | |
| | | CT | | | |
| SY4234 | SY4234R1 | GCGAGTG | | | 817 |
| | | TGCAAAG | | | |
| | | GGTTT | | | |
| SY4234 | SY4234A1FM | AGGCATT | G | | 818 |
| | | AGTTGTG | | | |
| | | CTTCTT | | | |
| SY4234 | SY4234A2TT | AGGCATT | A | | 819 |
| | | AGTTGTG | | | |
| | | CTTTTT | | | |
| SY4231 | | | | TGAGATAAATTCATAAAATGTGATAAGACCAGCAACCTAACACTAGCTTGATGCAAATTTTAATGCTCTG | 544 |
| | | | | CCTGCAACTTTTGGCGAAGCAAAAGTGCATGTACAGAAGGGGTCTAACACAAGGATGCAAACATATTG | |
| | | | | GTAGTAACTAGGAACAAATAGTGTATCTTGCATTCTTCTTCTCATGCACAAATTTGATTCACAGTAAGTAT | |
| | | | | AGCTGCACTAGTAGATTATAGTAGAAAGCATTGCTGAAGATGAAATATTAAGTGGTCAAATTTTAGATA | |
| | | | | TCACAGATCCAAGCACAATAATGAAAAACAAACAGCATTACAAATATATTATACAATAAAATACAACAAT | |
| | | | | ATCATACTAAGTTTCTGGAAACAAGATTTTACAGTTCATTACTTACATACAAAACTTTGTAAACTCATATA | |
| | | | | ATAAAGAAATATTTCGCACTTGTAGCAGCCAACAATGCTTTCTTCTCTGATCAGAAGCGTGCAGCACATC | |
| | | | | TGCAACAATCA[A/G]CATTTTTTTTTACAAAAATTAATGTGGTGGATTACAAGATATAGACAAAATTATA | |
| | | | | TTTGTTTATATAAAATTGAAAATGAAAGTATACATGCAGGGGCCATGCCCGCCCAAGTTTTTCACAAAGT | |
| | | | | GTATTTAAAATGCCATGTAAAAAGAATTACGGTCCCCTTAAAATTTATGAAAAAAATATTGAAAATAACA | |
| | | | | CACGTAGTTAACACTTAGGGGGAGAAAAGGAAAAAAAGAGAGAGAAGAGTGTGAGTATAATAGATAA | |
| | | | | TATAATGTGATGGTGTGATAGTAAAAAGTGAGATAAAAAGAAATTAAAGATATTAGTAAAGTATTTGTA | |
| | | | | ATGTTGAAGTATCTATATATAATTATCTAAAATCATTTTATATATGTGGTTATTTTTTAGTTTCTCATACATT | |
| | | | | ACCTCTATTAACATATTTAAAAGTTAAATAACTAATTAATCAAAATCAATAAAAATAATGAAGTAAACTAT | |
| | | | | TTTAATTAAAAATGTCTTAAAATAA | |
| SY4231 | SY4231F1 | GTAGCAG | | | 820 |
| | | CCAACAA | | | |
| | | TGCTTTC | | | |
| SY4231 | SY4231R1 | TGGCCCC | | | 821 |
| | | TGCATGT | | | |
| | | ATACTTTC | | | |
| SY4231 | SY4231A1FM | TCTGCAA | A | | 822 |
| | | CAATCAA | | | |
| | | CATTT | | | |
| SY4231 | SY4231A2TT | ATCTGCA | G | | 823 |
| | | ACAATCA | | | |
| | | GCATTT | | | |
| SY4224 | | | | CGCAACATGGCACGCCCCAAACAGAACAGCTGTCTTTGTCCCATGCTCCAGTTTGATCCCTCTCCAACAA | 545 |
| | | | | CTAGGTAACAATTTCGTACGAATCATTACTAACATGGGAAGAAGTGCTTACATTATATATAGTTAAAATA | |
| | | | | GTGAAAGTTGAAAGTGCACCTGAGGAGTTTAAGCCCTCTTCTTTCTCTTGAACCACTTCTTGCAATTGACA | |
| | | | | CTTGCCAAGAACCTGAGTTTATATTAAGCAAGAATTAGTCCATATTTGCTCTGAATAGCAAAGAAAAGCA | |
| | | | | GAGTGTAGCTCTAGTAGGTGTTACCTCCCATATCTCTTGATCAGAATGTTGAGATAAAGGGTCCAAATTA | |
| | | | | TATCTAACAGTCCCATTGAAAAGAGTAGGATCCTGAGGTATAATACATAAACGTGACCTCAAATCTTGAA | |
| | | | | GGCCAATAGAAGAAATGTTTATGCCATCAACAACGATTTTTCCGCTTGCTGGCTCCATGAGACGAAATAA | |
| | | | | AGCACTGAT[A/C]AGAGTAGACTTCCCACTGCCTGTCCTGCCAACAATACCAATCTTGTGCCCTCCTTCAA | |
| | | | | ATGTGCAAGTGATGCCATGGAGTACAAGTGGCCCTTCAGGCCTATATCTTATCTGTTTTGGTATAGACCA | |
| | | | | CAAAATTATGCATTTCATTTGAACTCCCATGCTTTTTAATATTATATATGTTGCAAATTTTAAAGTATGCAA | |
| | | | | TTAGACAAATACCTGCAGATCATTTATTTCTACTTTGCCTGCATCTGGCCAATTCAAAGGAGGACGATTTC | |
| | | | | CTTCTATTACTTCTTCTGCCTCACTTGGTATATGCATATATTGATTTATCCTTTCTACAGATATTATGTAATT | |
| | | | | TGCTATATTGCATTGACTTTGAATTAAAAATACCAAGGCTGCATTTAGTGAAAAACCATAAGAGAGAGCC | |
| | | | | ATGCCAATGAACCCTGGAAAAAAGGATATCGAAATTAAGAAGCTTGCATCAAGAAAGATATTGATACTT | |
| | | | | TCTGAGGATAAAATCAA | |
| SY4224 | SY4224F1 | GGCTCCA | | | 824 |
| | | TGAGACG | | | |
| | | AAATAAA | | | |
| | | GC | | | |
| SY4224 | SY4224R1 | GAGGGCA | | | 825 |
| | | CAAGATT | | | |
| | | GGTATTG | | | |
| | | TTG | | | |
| SY4224 | SY4224A1FM | TGGGAAG | C | | 826 |
| | | TCTACTCT | | | |
| | | GAT | | | |
| SY4224 | SY4224A2TT | AGTGGGA | A | | 827 |
| | | AGTCTAC | | | |
| | | TCTTAT | | | |
| SY4335 | | | | ATTGAGGTTGAAGCAATTGATGGTGGTTGACTTGTGATCTCCGTAGATATGAGCTAATACCTCTCCTTAC | 546 |
| | | | | CCCTCATTAGGCTTTTAATCAGATGTGGACATTAATTCCTTTTCAGTCTGCTGGGCCTATCATGCGTTGAT | |
| | | | | TTGGTCCTCTGTTTTCTTAATACTGTACTCATTGTTTCCTTACAGTTTGAAATTTGGATACTTAGCCCTTTTT | |
| | | | | ATTATCAGTTTCTATAATAAAATGCAGTAAGTTAATTTCAGTGTCTGGTGGTGNATTGTAAGACATGTAA | |
| | | | | ATAATGATAGAGATATGGCCCAAGTAGTGCTTATGAGGCTTGGATAGTTCTCACCTTACAAGCTGGTCTT | |
| | | | | GTACAGTTGAGTTTTAATCCAAATTCTAAGATACATGTATGATGTTCAAGAATTGGAGACTAGAACAAAA | |
| | | | | TTTGAAATTCAGTCAAAGCATCAATCTCCCATCTTAGGTTCTACATGTCATCAGTAAACCTGATAGGCTAA | |
| | | | | TAGCT[A/T]TGGCCAGAAGCTTTCTCCTTGCTTAACGAGTAGTTGGTAGAAAACTAAAAATAGCTAAAAT | |
| | | | | ATCAGGCATTTCATAAATTGAGTCAATTTGCTATTTGTCTTTATACTATGCTGTGTTGAATATACCTAAAG | |
| | | | | CCTGTAGGGAGCCTCAGNAGTAGTGAAATTATAGTTTATTTATGCTCCAGGTCACTGGTACAGTTCTTGG | |
| | | | | TGTGGAACCTTGGATAACAAAAATAATTTTTTGGTTAAAGTATATCCTTTTATTAATTTAGAATTAGATAC | |
| | | | | AGCTATCCCTGGAATTTGTGCTTAGATTTTGGAGTCAGGAATACATTTGTTTTATGTCGTTCATCAACTTT | |
| | | | | GGTTAGTTGTGACATTTAGATAAATAGATTTAATAGTAAGGCTAATTGTTGTAATTCACTTCACTGTAGA | |
| | | | | ACTGGATTTAAATATTCAGAAATTATGCAGCCTACATGATATGATGAGTTAAGCTGTTCCAAAGAGAAAA | |
| | | | | GATTGTCTTCAAACAA | |
| SY4335 | SY4335F1 | CAAGCTG | | | 828 |
| | | GTCTTGT | | | |
| | | ACAGTTG | | | |
| | | AG | | | |
| SY4335 | SY4335R1 | ACCAACT | | | 829 |
| | | ACTCGTT | | | |
| | | AAGCAAG | | | |
| | | GA | | | |
| SY4335 | SY4335A1FM | AAGCTTC | T | | 830 |
| | | TGGCCAA | | | |
| | | AG | | | |
| SY4335 | SY4335A2TT | TCTGGCC | A | | 831 |
| | | ATAGCTA | | | |
| SY4213 | | | | GCCGTGCCTGACTTCTCACCTACTCATTTTCGCTCTCTAGCTATAATGAGTTTATATTCACAACTTTTTAAA | 547 |
| | | | | TAATTTGAAGCTAACTGTATGCTACGGGGTTTATATAAAAAAAAAAATATTAAAGAATTGTGTTTTTAAT | |
| | | | | CTTTAAACTTTTGGGTAATATGGTCAAATTCAAATCACTGTACTTTTATATTGATGAATTTGGTTATAAACT | |
| | | | | TTGAAAAAAAAATCTGAATTTAGTCTCTCCGCTCAACTTTAAAAAAATAATATAATGATGGGCTCTTACA | |
| | | | | AATGGGAGACTTTTAAGGATCAGATTATTTGATATAAAAGTATGTAGATCTTAATTACTTACCAAAAGTA | |
| | | | | TATATAACAACTAAAAACACATTTTTTCCAAAACTATATGCTACCAAGTTGCAGAACATTATGAAAATATG | |
| | | | | TTAATATTAAATATGCTTTTAATAATCACTGTATAATTAATTTTAAATTTCTAATGTTAGTCCTTATAAAAA | |
| | | | | AAA[A/T]TTGGTCATTTTTATAGTCTCATTTATTTTTCACCATTAATATTAGTTCCTTTAAACAAGGACAAT | |
| | | | | TTTCTTCTTCTTTTTTCTCATTTTCAGTCCCTTTCTCGGACTCATATTGATAATGGAAAATAAACGAGAGGC | |
| | | | | AAAATATGGACAAAAAATTAATAGGAATTAAAATAAAAAAAATCTGAAATTTTACAATGATATATTTAAT | |
| | | | | CCAATAGTTAATTAATCATCATGCACATATATTTACTTGATATATTTTAATTTGAGTCAACTATATGCTACC | |
| | | | | ATAAATTTGACTAAAATGAGTGGCAAGAAATTTTTCATTCTCTTCTAAATACAAGTGAAAATCAAACATTT | |
| | | | | TTTTTAAAATAAAAGACTGAATAAGTTTTAATATTGTATGCATGTACATGATTGTGACTGCAACGTTACTA | |
| | | | | AAAACTATTCCAATAATGTGTCACCTGCCACAATGGCAACTTGCAAGGTAGCAAAAACGAAAATAATTA | |
| | | | | ATGGAGATGA | |
| SY4213 | SY4213F1 | GCTACCA | | | 832 |
| | | AGTTGCA | | | |
| | | GAACATT | | | |
| | | ATGA | | | |
| SY4213 | SY4213R1 | TCCGAGA | | | 833 |
| | | AAGGGAC | | | |
| | | TGAAAAT | | | |
| | | GAG | | | |
| SY4213 | SY4213A1FM | AGACTAT | T | | 834 |
| | | AAAAATG | | | |
| | | ACCAAATT | | | |
| SY4213 | SY4213A2TT | AGACTAT | A | | 835 |
| | | AAAAATG | | | |
| | | ACCAATTT | | | |
| SY4227 | | | | CATTCCGAGAATTTATTTCAATGAATATTTCATACAATAATCTCCATGGTATAATTCCTAATTTTCCAACAA | 548 |
| | | | | AGAATATTCAATATTCCCTAATTCTTGGACCAAATCAATTTGATGGCCCTGTTCCACCATTTCTGCGAGGT | |
| | | | | TCCGTATTTCTTGATTTATCCAAAAATCAATTCTCAGATTCTCTTTCATTTTTATGTGCTAATGGTACAGTT | |
| | | | | GAAACTTTGTACGAATTAGACCTTTCAAATAATCATTTCTCTGGAAAAATTCCGGACTGTTGGAGCCATTT | |
| | | | | CAAGTCATTAACTTATTTGGACTTAAGTCACAATAATTTTTCAGGAAGGATACCCACATCCATGGGATCTC | |
| | | | | TTCTTCATCTTCAAGCATTGCTATTGAGAAACAACAACTTAACAGATGAGATACCTTTCTCCTTGAGGAGT | |
| | | | | TGCACAAATCTAGTAATGTTAGATATTGCAGAAAACAGATTATCAGGGCTTATCCCTGCTTGGATTGGGA | |
| | | | | GC[A/G]AATTACAAGAGTTGCAATTTTTAATTTTGGGAAGAAATAATTTCCATGGAAGTTTACCATTGCA | |
| | | | | AATTTGCTACCTAAGTGACATTCAACTCTTGGATGTCTCACTAAACAACATGTCTGGGCAAATTCCTAAAT | |
| | | | | GCATAAAAAATTTTACTTCAATGACTCAAAAGACATCTTCAAGAGATTATCAAGGTCATTCATATCTTGTC | |
| | | | | TATACCATTGGCATTTCTGGTAATTATACATATGATTTGAATGCACTCTTGATGTGGAAAGGTTCAGAAC | |
| | | | | AAATGTTCAAAAATAATGTGTTACTACTTTTAAAAAGCATTGATCTCTCAAGCAATCACTTTTCTGGAGAA | |
| | | | | ATTCCACTGGAAATAGAGGATTTATTTGGATTGGTTTCATTGAATTTATCAAGAAACCATTTGACCGGAA | |
| | | | | AGATTCCTTCAAATATTGGAAAGTTAACATTACTTGACTTTCTTGATTTGTCAAGAAACCATCTAGTTGGT | |
| | | | | TCAATTCCTTTG | |
| SY4227 | SY4227F1 | GCAGAAA | | | 836 |
| | | ACAGATT | | | |
| | | ATCAGGG | | | |
| | | CTTA | | | |
| SY4227 | SY4227R1 | GAGTTGA | | | 837 |
| | | ATGTCAC | | | |
| | | TTAGGTA | | | |
| | | GCAA | | | |
| SY4227 | SY4227A1FM | CTTGGAT | A | | 838 |
| | | TGGGAGC | | | |
| | | AAATTAC | | | |
| SY4227 | SY4227A2TT | TGGATTG | G | | 839 |
| | | GGAGCGA | | | |
| | | ATTAC | | | |
| SY4220 | | | | TGCCTTGTCCAAGACTACGGAACGATCTAAGAAAGTAAGAAGAATTATTATGATCACATATTTTATACTC | 549 |
| | | | | TTCAAACTGTGAAACCAACAATGTGAAATACAAATCTCCAACTATGCTACAAAACCACACAGTTCGACTG | |
| | | | | ACATTGAATATGATCCCTTAAGTAGTATAAAGCATTTTTTTTTAAAAGATAAATTTAATATCATGAAAAAG | |
| | | | | ATAAAGACAAAAAATGATGTATAATTATATATATATATATATATATTATATATATATATTAAATCTCCTTTT | |
| | | | | TATACACCAGAATGTAAGTAATTGGCTGATTTTATTTTCATTTCATTTATTTACGCAAAAAAAAAAAAAAAA | |
| | | | | GAGTTTGGGGGCCGTGGTCAACAGTAACACAAGAACAAGTATGAGCCCCATTCAGTTGAGAATAGTGA | |
| | | | | TTCAGTACATACTGTTACAGAAAATTCTGGTTATrGAATCTTCAAAATTGTACAAACTGTAAACAAGAGG | |
| | | | | CAGAAAAC[A/G]CAGTCTACAAGTAACAACTAGAATCATAATGAAATGTGCTAAACAAAAATATCATCA | |
| | | | | TGTGCCCAAAACAGCACCTAAATTGTGTCTTCATCCCAGTTAAATAATGCTTAATTTCTTCAACCACCTCA | |
| | | | | ATTGCAAACACCTAAATTCGTCGTTTCTTTGGGAGTCTGCAACCATTATGGGGTTTTCTTGTAGTATCTTC | |
| | | | | AATGTATACAATTGGACTTCTATCCCCTCGAGCTACATTGTTGGGGTACTAGCTAGTGCTATCTCTTTAAT | |
| | | | | TTTCCACACAACCCTTATTTTTTCTGTTTTCTTTCTGCATGTAAAATATGAAGGTCGATTCAAAACTTAATT | |
| | | | | TTATTTTATTCTTTGTGTCCAATATTATTAATTAGATGAAGAAGGCATTGAACGACACATCATGTTCTTAC | |
| | | | | CAAGTGATCATAGCTGCAAGTTGCTCATCGCCCAATTTCACAATGGAGAACATTGCTATTCGCTTTGGGG | |
| | | | | ATGTTCATGGCAACCAA | |
| SY4220 | SY4220F1 | TGAGCCC | | | 840 |
| | | CATTCAG | | | |
| | | TTGAGAA | | | |
| SY4220 | SY4220R1 | GCTGTTTT | | | 841 |
| | | GGGCACA | | | |
| | | TGATGA | | | |
| SY4220 | SY4220A1FM | TTGTAGA | G | | 842 |
| | | CTGCGTT | | | |
| | | TTCTG | | | |
| SY4220 | SY4220A2TT | TACTTGT | A | | 843 |
| | | AGACTGT | | | |
| | | GTTTTC | | | |
| SY4343 | | | | GCCACACACTTGCAATAACATGTGTAAAATGGGGTGGAGATGGCGTGATTTATACTGGGTATTCTCTCCC | 550 |
| | | | | TCTGTCCTTCCAGTTTCTGTGAAGTTCNGCCTGAGTTTTTATTTGTAGTAATTCTTATTGTTATATTGCATA | |
| | | | | TTCCTGCATATTCCTGCATACCCCTGTTGGAAATAGAAACTCATTTAGGTTAAATTCTCATTTTATGATTTT | |
| | | | | AACTCGTGTTTTTATCCAAGAGATCTTATTTTCAGTCCTTTAACTCAACTGATCCTAATGTTGATTGATGAT | |
| | | | | ATGAACAGGGGTTTTCCCCTCTTTTTAATTAAATTAGTGTCTTAATTATCACTCTGCAATTCTTTTTACTGC | |
| | | | | TTGGAGCTTAATTATGTTGTTTTATACAGCTCACAGGATTGTACAATCAAAGTCTGGGAAACCACACAAG | |
| | | | | GGAAGCTAATCCGAGAACTGAAGGTGAGCGTCATCCCTTTGCAGTTTAACTTCTTATCTGCATTTTTTTTA | |
| | | | | A[A/T]CATGGTTTTTGTTATGCATAACTCCTGTTTCTCATCTGGTGTCAACTTTTTCTTCATTTGAGTTATTT | |
| | | | | GATANNNNCTTTAGTGTCACTTTTATGCATACCAGATATAGCTACTAATTGGTATTTTACTATTTATGGTG | |
| | | | | AAGCAAGAATTTTTTGCTGTCACATTTGCTTCCTAGGAAAGTGAAAAATTGCTTTTGAAAGCGTGCAACA | |
| | | | | GGGTTCCTAACGGTTTTCTGAACATACATTTAGTGTTTTATTTTGATTCATTATTCATTGTTAGTGTAAAAT | |
| | | | | TTTTATTCAATGTGTGGATACATCTTTTAAAAGTTTGATTCTCCAGGTATGGTGACCAAACTTCTGTTTATC | |
| | | | | CATTGTTAGAATGTTAGTGTAAAATTTTTATTCAATGTGTGGATACATCTTTTAAAAGTTTGATTCTCCAG | |
| | | | | GTATGGTGACCAAACTTCTGTTTATCCATGTTGCATGAGACTTTTTTCTTTTAATTTTATTTCAATTAATGT | |
| | | | | TTTT | |
| SY4343 | SY4343F1 | GGGAAGC | | | 844 |
| | | TAATCCG | | | |
| | | AGAACTGA | | | |
| SY4343 | SY4343R1 | TGACACC | | | 845 |
| | | AGATGAG | | | |
| | | AAACAGG | | | |
| | | AG | | | |
| SY4343 | SY4343A1FM | TGCATAA | T | | 846 |
| | | CAAAAAC | | | |
| | | CATGATT | | | |
| | | AAA | | | |
| SY4343 | SY4343A2TT | TGCATAA | A | | 847 |
| | | CAAAAAC | | | |
| | | CATGTTT | | | |
| | | AAA | | | |
| SY4316 | | | | TTGGTCTTTGGTGTGAGTTTTTGTTGCGATACCTTAGCTTCGATGAAAGTGAAGAGGATGATATGCGGG | 551 |
| | | | | AGGGGGTGGTTCGTAAATGTTACAGATGAAGTTAATCCATAAAAACGATATGAATCAACTTGATTTGTA | |
| | | | | TGTTGACATTATACTTATACGGATCAAATTGATTTGTGTAAGCCTTCCAGATCAAGTTGATCCATAATATT | |
| | | | | TATACGGATCAACTTGCTTGCATAGCCCAAAATGTCTAGTATCTATAATAGATAATAAATGATTGTATTA | |
| | | | | GTATTTAATAATAAAAAGTTGTCACAAGAAAATAAGAAAAGGGAGGAGTGATCTGATACTAGTAAATTA | |
| | | | | GCATGCGGTTATTAAATATTATCAAGATATTAAAAATTATAGTATTATATATAAATATCTATATTCTCATC | |
| | | | | AAGAAAAAGAAAAATAATTATAAGTAATGAGAGAAAAATAAAAAACAAAATTCAGAAATAGTAAAAAA | |
| | | | | ATAGTTGATTTGA[A/G]CATTATTTTACTGGCAATTTCCAAGCAAGAGTATCTTCATTATATTTCTTAGGC | |
| | | | | TGGGTAAGATATGGAGATGAGAAGCAAGGAAGAGATAGAAATAGGAAGAGACATAACACCAACACTC | |
| | | | | ACTCCTCTCTCTTCATTATATTTCCAAGCAAGAGTATCTTCATTATATTTCCAGTTGTAAAGAATTCATTAA | |
| | | | | CCGCTGCAAAGATATCGTCACCAATGATATTCCAAGTCTTCTTGAAGAATAAAACATTGAAACCATCTGG | |
| | | | | CCCAGGAGCTTTATTGTTATCCATCACAGAAATAACGTTCCAAACCTCTTGCTTAGAAGTAGGACAAAGT | |
| | | | | AAGGTCGCAAAGCAATCGATGGAAACCTTAGGACCCNTGTTGCAGATCGAAATGGAAGGAATTTGGGT | |
| | | | | CAGCTCATGAGCACTAAACAAATTCCAAAGTGATTCACAAAAGCAAGGACAATTTCATCTTGGGAGGA | |
| | | | | AGTGTTATGCCCATCCTCTAGCCTTATGGC | |
| SY4316 | SY4316F1 | GAAAAGG | | | 848 |
| | | GAGGAGT | | | |
| | | GATCTGA | | | |
| | | TAC | | | |
| SY4316 | SY4316R1 | ACCCAGC | | | 849 |
| | | CTAAGAA | | | |
| | | ATATAAT | | | |
| | | GAAGATAC | | | |
| SY4316 | SY4316A1FM | CCAGTAA | G | | 850 |
| | | AATAATG | | | |
| | | CTCAA | | | |
| SY4316 | SY4316A2TT | TGCCAGT | A | | 851 |
| | | AAAATAA | | | |
| | | TGTTC | | | |
| SY4225 | | | | ATGATATGGACCCTAAAACACCTGTCCTAGGCCCAGGATCCAACAAACTACAAATACTTTGACCCAAGG | 552 |
| | | | | GGAAAGAAAAAATTGACTCAAAAAGAGGGTTAACAAGAAAAAAAAAAAACTTGAAATACCTTCAACTC | |
| | | | | GAAGAACACAACCACTGAAAAAAGAGAAAGTGAGAAAAGGGTCGAACAACTGGTGAAGTCATTGATG | |
| | | | | GCTACAGAGGAAGAGAGTGCGGTGAAGGAGCCTTTGGATCTCATTAGGCTCAGCCTCGACGAGCGTAT | |
| | | | | CTATGTCAAACTCCGTTCCGACAGAGAGCTTCGTGGCAAACTTCACGTAATTCTTCAATCTTTTTTTTTTCT | |
| | | | | CCTTTTCATGAATTTGTCTGTTTCTTTAAGCTTTTTTTTTACTCTTTTTGAGACTTCCCTTTAACGCGTAGGG | |
| | | | | TGTTTTGGGTGTTCTGTGATGGAAAATTTAAAATTTTAAAGTTGTTTTCAAGGTAATTGAAATCTGGGTTT | |
| | | | | GTTGCAATAGTT[C/G]GCAAGTTTGTGCCTTTCGGACTTCCCTAATGATATGCCCTATGTAAGAATAATG | |
| | | | | GGGTGTATACTACTTGCGTGTGGGGATGGAATTGAGTCTTTGGTGGTTCCAAATTTTGCGCTTTGGAAG | |
| | | | | AAAGTTGTTTTTTGTTGCTGAATGGAAATTTGAGTGTTTTGAACTATAATTTAGAATAAGCAGGTTTGGG | |
| | | | | ATGAGGAATGATAAGTATGAGTTGTTTATTTTTTTTGCAAAATATAAGTACAACTTGTTAGTTATTTTTCT | |
| | | | | TCACTGCTATTAACTGATGTTAAACTAGATCAATGATTTGGTGCATTTTGCGTGGGTGGGGTGGTGGTTT | |
| | | | | TTATGTATGTGTTTGTTTACTGTTCTTGCATTTTTATAAGATTTTCATGAGCTTGTAAATTGTAATTTAATTT | |
| | | | | ACCGAAGAGTTCCTATCTGAAACTAACCTGAGTTCACAATGATTTTTACAAGTTACACATCACTGTCATTG | |
| | | | | ATCTTGTTCATTTGATAGAAGT | |
| SY4225 | SY4225F1 | TTTGGGT | | | 852 |
| | | GTTCTGT | | | |
| | | GATGGA | | | |
| SY4225 | SY4225R1 | GGCATAT | | | 853 |
| | | CATTAGG | | | |
| | | GAAGTCC | | | |
| | | GA | | | |
| SY4225 | SY4225A1FM | CACAAAC | G | | 854 |
| | | TTGCCAA | | | |
| | | CTA | | | |
| SY4225 | SY4225A2TT | CACAAAC | C | | 855 |
| | | TTGCGAA | | | |
| | | CTATT | | | |
| SY4219 | | | | AAAAGATGAAATGGAGACAAATCTTGTCAATCTTCGAAAGACAAAATACTCAGCAATTATGTCTAGTGTT | 553 |
| | | | | GATTTAGAGGAAGCTGGTCATAAGCTTCTGGAAATTAAGCTAGAGCCTGGCCAAGAGATGGAATTGTG | |
| | | | | CATTATGATTTTGGAATGTTGCAGACAAGAGAAAAACCTATCTCTGATATTAGAGTCTTCTCGAGCAGTG | |
| | | | | TTTGCAGATGTGGCAAAGTTATGATTTTGGAATGTTGCACGATCAACAAAGTACACCAAGAAAATCTCG | |
| | | | | AAAAGTGCTTTTTGCAGCAGTACTCAATGATTAACCGACTTGAAACAAATAAACTGCATAACGTGGCAAA | |
| | | | | GTTTTTCGCTTGTTTATTTGGCACAGATGCTCTACCTTGGCATGTTTTGTCATATATACGCTTGACTGAAG | |
| | | | | ATGATACAACTTCTTCACGTATATTTCTTAAGACTATTTTCCAGGAAATATCAGAACATCTTGGAATCGGG | |
| | | | | CTGNTAAATGA[A/G]CGGTTAAATGATCCAACAATGTAAGAATCTTTTGATGAATCCATATTTCCAAAAG | |
| | | | | ATAATCCAAAAAACACACGGTTCTGCATTAACTTCTTTACATTCATTGGTCTTGGTGGTCTTACTGAGAAC | |
| | | | | CTACGTTAGTATTTGAAGAATATGCCGTGTCTTATCAAGCAACAACAGAAAGATGAGTCAGGTAGTTCT | |
| | | | | GATTCATCAGATTCAGATGCAGAATCAGCAAGTTCGGATCAAAGTGACACTGAGAATGACAGAAGCGG | |
| | | | | AAGAAAGCGGCCGGAGGACAAAGGGTGAAGCAATTTGATGCTATTGTCGAAGGCCCTTGCATCCACAA | |
| | | | | AACTGATTGAGTATCCAAGGTTTCTTAATCTTTAAATATCACTGAACTTACTTGCCTTGTTATGCAAATAT | |
| | | | | GAAAGGGATTTTTTTTTTTATCAGTAATGTGAAAGGGATATGTGGGCTATGCTGGTTGAGATGTTGAGC | |
| | | | | ATGCTCGATGGATTTGTTTAATTTTGTTC | |
| SY4219 | SY4219F1 | ACGCTTG | | | 856 |
| | | ACTGAAG | | | |
| | | ATGATAC | | | |
| | | AAC | | | |
| SY4219 | SY4219R1 | AAGTTAA | | | 857 |
| | | TGCAGAA | | | |
| | | CCGTGTG | | | |
| | | TTTT | | | |
| SY4219 | SY4219A1FM | TCATTTAA | G | | 858 |
| | | CCGCTCA | | | |
| | | TTTA | | | |
| SY4219 | SY4219A2TT | TGGATCA | A | | 859 |
| | | TTTAACC | | | |
| | | GTTCATTT | | | |
| SY4326 | | | | GAATTATGGCCCATTACGCGTAAAGTTGCCAATTCGATCTCTCTTTATAAAAGTATTTAGGAGTAGGAAA | 554 |
| | | | | AGGTGTCCATTTTTCTTCTCGAAATTCAAGAGTAAACAAACTACGGTTGAAAGAAACGTCTACATAATTG | |
| | | | | AAAAAAAATGAAATCTTATTTTATGTGTGTGTGAGTTCTGCCCAACATTGACAACACGGGAGTATATCCC | |
| | | | | TGCTGCTAATAATTTATAATAAAAAAATATTTAATTTTAAATGATTAAAAATTTTAATATAAAAAATTGAA | |
| | | | | ACGTTTATAAATTAATGTGAACTTAGACCTCCAAATGGATTCTTACACTGTAACTGATGTCACNTAGGTA | |
| | | | | GTAGAATTCCAAGATCCAAAGGCACTAGGTGTGTATATTCAATTATACTTAATTTATTGTAATTTTGTATC | |
| | | | | GTTCTGTATGGCTTGACAGCTTTGGATGTTCTTCAAGTCTAAGTATCATATTTATATAAGCTGAGACAGA | |
| | | | | GATATCAG[A/G]TTTTNATTTGTACAGTCTAAGTAGTATAGTGTTGTGCGAGTGACTTGTGACTAAACGA | |
| | | | | TAATATTTTATATGCGTGGAGAGATCGAGAACGAGCTAATATTGTAGTCTTTTCTTAATTTCAACTTTCTT | |
| | | | | TTTTATNTTATTTCCCTCACAATATATATGGGAATGCTATACATGCTTAGATTTTGAGAAACCTAATTAGA | |
| | | | | GGATCAATGCAATGCAAATGCAGAAATAAACTTTCTTCCTTGTTATTTTTTCTTTCTTTCTGAAACAGCCA | |
| | | | | AAAGAATATCATTGAAATAGCACCAGAGGTGCAACAACACAAATTACAGGATTAGAGAAAGACATAAA | |
| | | | | ACAACATTTAACAGAGTTAGCCCTAGCTCCCAAGGCATAACACACTTGCCAAATAATAGATGGCTCGAAC | |
| | | | | CCCCTAGAAGAAACAACATCCGGCAAATACAATAACCTAGGTAACACTTAAACTGAAATAATCGCAGGA | |
| | | | | ATAGAAACAGAACCCAGCGTGA | |
| SY4326 | SY4326F1 | GCTTGAC | | | 860 |
| | | AGCTTTG | | | |
| | | GATGTTC | | | |
| | | TTC | | | |
| SY4326 | SY4326R1 | GTCACTC | | | 861 |
| | | GCACAAC | | | |
| | | ACTATAC | | | |
| | | TAC | | | |
| SY4326 | SY4326A1FM | CTGAGAC | A | | 862 |
| | | AGAGATA | | | |
| | | TCAGATT | | | |
| SY4326 | SY4326A2TT | TGAGACA | G | | 863 |
| | | GAGATAT | | | |
| | | CAGGTT | | | |
| SY4232 | | | | TTATAATTCCATGTTTCACACTTATTTGAGCTTTGATATACAGAAGGATATAATTCCCTAGCCATAGGAGA | 555 |
| | | | | CATTGGACTGTAGTGAAATAATTGTATCTAGTAAAATTGGGTCGTGTTTGATTTATTTAGTTTTTAGCCTA | |
| | | | | AGTGGGTATATATAGCAGCAGCCTTCACAACAATTAATTAATGATCAAGTTTTTAAATATATACCCAGAA | |
| | | | | AAAATTACTGGGTTTCCCCCAATGAATTAGTCAATAGTCAATAATGATTTTGATGGATTTCAGTCTCGTAA | |
| | | | | GCATTCCMGCACCCGGGGGCTATTAGACMMTGTCTATTAATAACTAGAAAATTCAACTAACTAAATT | |
| | | | | AGTGAAATTTGAATTCGGGTATATTGCAGTTCTTATACTAGATAACCTTGATATCGAGCATTTCCTTCCTC | |
| | | | | TTTTTTATTTTTATTTTATACATATTTATTTAAAAACAAAACTGCATTTGCTAAAAGAAAGTCTGGGTATTG | |
| | | | | AATT[A/G]TTAGGACTGGACTATGAAAGTAAAAGCCTTAATTCAATTTTGAAATAGAACAAATCAAAACC | |
| | | | | TTCTCCGAAATCTCCTAATTATGTACTAATTAACTAGTTTAATTTTCTCTGACTTACACATATATTAAATTCA | |
| | | | | TTTTTATAATTTATAAGAATAATTTTTTATATTATTTGAATTAATATATTATTAATGATTTAATTTAAGTTTT | |
| | | | | AATAAATATATATTAATAGATATATCAATAAATATTTAAATATGTTTTTATACACAAACATATTTCAGAAA | |
| | | | | ATTGTTATTATTATAAGTATTGTCCTATATAGAATTTATTTTACTTTAATGATATATTACATATTTTCTTTTG | |
| | | | | ACTTTCTTTTAAAAAATTAATTTTATTCTTTTTTTACACATTTGATTTGAGATAAAAAAAATTGGGTGAAGT | |
| | | | | CATTAATTACAAAAGAATAATTTAATCTAGATTTAAATTATTTTATTGGATGATCAATTAAATTTATGCAC | |
| | | | | GTATA | |
| SY4232 | SY4232F1 | CCTTGAT | | | 864 |
| | | ATCGAGC | | | |
| | | ATTTCCTT | | | |
| | | CCT | | | |
| SY4232 | SY4232R1 | TTCGGAG | | | 865 |
| | | AAGGTTT | | | |
| | | TGATTTG | | | |
| | | TTC | | | |
| SY4232 | SY4232A1FM | TCCAGTC | G | | 866 |
| | | CTAACAA | | | |
| | | TTCAA | | | |
| SY4232 | SY4232A2TT | AGTCCAG | A | | 867 |
| | | TCCTAAT | | | |
| | | AATTCAA | | | |
| SY4330 | | | | ATTTTATTTTTTAGTGGACATTCTTTAACTTGTGCTTCTATTGCTCTCAATAACTTAAAGAATCAATCATTTT | 556 |
| | | | | AAAATTTGGTTACGAAGGACGAGCTTTTTAGTGTGATTTTTAGTATCTTAAATACATTCCATATTGTGGTA | |
| | | | | TAAATTCAAGGATCTTTATATATTTTGAACTTTGTATAGGTTAAAATGTACATATTAAATTATCTTTCAAAA | |
| | | | | AAATAATAGACTTAGAAAGAAAAAACTTGATCAACAGATACTAGAAATAACTTGGAAACTTTTTTAGGTA | |
| | | | | TCATCATGTTCATAAATTTATCATGTTCATAAATTTATAACTGTTGAGTTTTTTAACTCTCTTCTTATATGGA | |
| | | | | ATAAATGCTCAAATGAAAAGGTTTGTATATCTCACTTATTTTAATGAAGAGAGATCAGATTAAAGAGAGT | |
| | | | | GAGATACACTNAGAGGAACTCATTTGAGAGGAAAAAAATAGTTACAAATCATTAAGAGAGAAAGAAGA | |
| | | | | ACA[A/G]GAAAAATCATTGTGATTTTTGCATACCTATCAAAAAGTGTTTTTAAGATTGCAACTGTNGATT | |
| | | | | TGTTCACTGTTGGATCGGNCTGATTTTTGGCCAGGAGACTCTACACACGTGATATTTCAAGTTGTTCGGT | |
| | | | | TGGATCATGAAAAAGATACCTGGAGAGAGAGAGATAAGTGTTTCNTATTATCTGTTCTATATTTTGGAG | |
| | | | | TTTTATCTTCTTGTCTCTATTGTACCAATTGAAAGTTTATTTTGATTTGACTGCTTGTAGCATGTTTTAGTAT | |
| | | | | ACTTGTTGGATGTTTTCTTGTATCTTCATTGATTATAGTGGAGTTATTTTTTTGGTCTAGACGACCTATAGT | |
| | | | | TTTTATCCTTGCATTGAGGGGTTTTCCACGTTACACAAAATGTGTCTGATTTCTTTCATTTTTATTTCGCGC | |
| | | | | TCTATACTTTATTGGTGATCCTCACAAATTCTTGTAAGTTTAACGGAATTTATTTCCACTGTCTATTACTCA | |
| | | | | CTTATAGAA | |
| SY4330 | SY4330F1 | TGAAGAG | | | 868 |
| | | AGATCAG | | | |
| | | ATTAAAG | | | |
| | | AGAGTGA | | | |
| SY4330 | SY4330R1 | TGTAGAG | | | 869 |
| | | TCTCCTG | | | |
| | | GCCAAA | | | |
| SY4330 | SY4330A1FM | CACAATG | G | | 870 |
| | | ATTTTTCC | | | |
| | | TG | | | |
| SY4330 | SY4330A2TT | ACAATGA | A | | 871 |
| | | TTTTTCTT | | | |
| | | GTTC | | | |
| SY4325 | | | | CTTTATTTCTTTTCAAATTTTATTTTCATTTATATGCAAACATGAAATATTGTGTTAGTAAGATGTCTAGAG | 557 |
| | | | | AGATAAATATACCAATTGAGAGAGTGGGGGGGGAATAAGATTGTTGATTACATTGGGCAAGAAAATCT | |
| | | | | ACAACTTAGCCTTAGGCCAAAATTTTAAATGTGAAACCAATGATCTAGCCTTAACTAATAGGGTTGTGAA | |
| | | | | GGTTCATTGGGCTTGTGGACTTTTTTAATGTTAGGCTTTTGACTTTGGGAACAATTATTCCTATTACCAAA | |
| | | | | TTTGCTATTGGCCCTACTAACTTTTTTGAAATTCTTCTTTTGCCCACTCACCAAATCCATACACCCATTCCTT | |
| | | | | TCTCCTCAGATTCAAAATTGTCTCCCCCACCCTAGCATCCCAGATCCATAACCCCCATGTTGCTCTCTCCCT | |
| | | | | CGTGAAACCCCTCCCCTCGTGCCACCCCTCTCCCTCATATTCCATTGCTTTATTTTTTTCANCCCCATGTGT | |
| | | | | GCA[A/T]CGGAAATACAATTATGTTATAGACTTGTTCAACAAAATCGTATTTCCTTTGGAAGGATATTTTT | |
| | | | | GGAAAAAATATTTAAAAGTTCATGTGGGTAGTGCCAATAAAAAAAGTTGATAGTCACAATAGCATGCCC | |
| | | | | CTTTGACTTTATAGGCCTTTTACTTGAACCCATGTGGAATATGAGTGAGCAAGTGGGGTGGAGTGACTC | |
| | | | | ATTTTAATAGCTCTATTCATATCAATAAGGCTAAAACTTTATGCACCTCCAAAAATTTCTTCTAACACCCCA | |
| | | | | TTACATTCTAGAATATGATGGGTGTGCAAGAAGCAACAATCTATCAACAAATGTGTGCAAATTCACACG | |
| | | | | AATTGCAACTTGCAAAGAGTGTCGAATACATTCATACACTGAATCAAATAAATATAAACTAGAGAAAATA | |
| | | | | GGGACCGTAAGATCCAATGATTTGCTCGTNGATGAGTATTGCACGTTATATCTTCACACTTCGTTTTTTTT | |
| | | | | ATCCATATAAAGCTCA | |
| SY4325 | SY4325F1 | CCTCTCCC | | | 872 |
| | | TCATATTC | | | |
| | | CATTGCTT | | | |
| SY4325 | SY4325R1 | TGGCACT | | | 873 |
| | | ACCCACA | | | |
| | | TGAAC | | | |
| SY4325 | SY4325A1FM | CATGTGT | A | | 874 |
| | | GCAACGG | | | |
| | | AAA | | | |
| SY4325 | SY4325A2TT | CATGTGT | T | | 875 |
| | | GCATCGG | | | |
| | | AAA | | | |
| SY4217 | | | | ATTTTGTGTGATCGCTCCACCATCCCAAACATACCAATAATAAACAGCAAATTCATTGTCCTAATGCATAA | 558 |
| | | | | AATGAACACAGTTATATTTAAATTGATTTAGTAAAAAAGCTGCAAGATACACTGAACCTGAGAAGTTAAT | |
| | | | | CTAAAAAACAAGTTCAGTCACCACCTGTGAAGTTTGAAATTTACAGCTGGAAGATCCTATTAGATACTGT | |
| | | | | TCTAATACTTTGGGATGCAATAGCCATCCATGTATGAATATGGAATTGGATAAAAAATCAAAAGCTCTGC | |
| | | | | ATGATATCGGGCCAATTTTAACTAGCCACAAATTAAAATGAAGTGTTGCAAACAATGTAGCCCAATCACA | |
| | | | | AAACCGATAGGAGGTAAAAAAACGGAAATAGAATGAACAGTATTAGAGTAACTTGCTACCTCTTCATCA | |
| | | | | TGTGTATTGTTATAGAAAGATTTTAATAGGATATGTAGAATTCTGTCCAAATGAAAAGAAAAAAAAAAA | |
| | | | | AACAGGTCCTA[A/G]GAGTATCTCCAATCTCCAATAGAAAAGTCATTCATGCATTCTTTAACTTACTTTTA | |
| | | | | AAGAATACTATACAGCCATATAAGATTTAAGAATTTCAACAAATTTTAATTCAATAGTAGAATTCTTAAAA | |
| | | | | GCTTCAAACTAGCTTCACAACGTACCTTACATTTATATGTTTTGTGTTAATTCTGACAATCAAAATAATTGT | |
| | | | | TTATATGTTCTTGGTAGTCACATTATTACAAATCTTAATAGAACTGCTCAGATGTTGTAATTTAATTTTTCA | |
| | | | | TGCAGCAAGTGGACGGAAAAAATTCTTAATTGTTGAAAAGAAAAGACTGATTCAGTAATGAGGGTTACA | |
| | | | | ATAAGAACTCGGTGTCATAATGTTAACTAAGAATGGTTCGACTATATTAACGAATTGGTATATTACAGAA | |
| | | | | ACACAAGTTTAAAAGTTATGGTCTTGAGAACGCAACAAAAGACAGAAAGACTTGATTATTTTCCAAGAA | |
| | | | | GGGATGCCACTATATTAACTT | |
| SY4217 | SY4217F1 | TGCAAAC | | | 876 |
| | | AATGTAG | | | |
| | | CCCAATC | | | |
| | | AC | | | |
| SY4217 | SY4217R1 | TGCATGA | | | 877 |
| | | ATGACTT | | | |
| | | TTCTATTG | | | |
| | | GAGA | | | |
| SY4217 | SY4217A1FM | TTGGAGA | G | | 878 |
| | | TACTCCTA | | | |
| | | GG | | | |
| SY4217 | SY4217A2TT | TTGGAGA | A | | 879 |
| | | TACTCTTA | | | |
| | | GGA | | | |
| SY4215 | | | | TTAAAGTATCTTTGCAAAAACAATTTCACATGAGGCAACCTTAATTTGCAATTGAAAGTTCTTTATTGCAA | 559 |
| | | | | TATCAACTCTTGGCTTTGGATGTGTTTTCACCTTGTACTCCTTCTGGCGTATATTTTATGTCTCTTTAGATCT | |
| | | | | TAATAAAGGTATTTTTGTCAAAATGATCATTTTGTCACCGTACCTTATGTCATTAATATTTTTCTTAAGATG | |
| | | | | CGTATATTACCTTAATTAAGACAAATAGAGCTATGCCATTTTTTATGAAAGTAACATATATACAAAAATAT | |
| | | | | GAAAAACTCTTTTTCACACAAAAAATGATAGTTTTTTTTTGGTTTTTTTATTATTAAAGTAGTTTCCATGCA | |
| | | | | GATTAATGATAGTTTCTGATTAAGGGGATCGTTTCTGTTTGATTTATGCAGGTATAATTAATACGCTGGG | |
| | | | | TAGATTTGTGTTTAAAAATGTCCAACAGGTAAGTTAAACAACTATGATATTTGAAGCCAAATAACACGAG | |
| | | | | T[A/T]CTCGTAAACTATTTAAGTTAGATTATTCATTAAATTAAATGTTTGGTAACTAGAACAAATATGATA | |
| | | | | TTTGAACAGAGATATCAATACAAATGACATGAGTTATTCGTAAACAATTTAAGTTTGATTATTCATTAAAT | |
| | | | | GCATGCTTGTCCAAGATTGTTCGTTTAGTTGGACAAACAAACTTAAACTTATAGTTCAACTCATATCATTG | |
| | | | | ACAAAATAGCAATTAATATTGTTTTGGACTTTTAAAATGACAAATACATGTAATTTTTCTTCTTCTAAAAA | |
| | | | | ACCAATAATGTTAATGCATTTTTTGCTTTATTTATTTAAAAAACGCATAATTTTTTTAAACATCTTTTAATTA | |
| | | | | AAAAAGCACTTTCCTGAAAATAGTTTAAAAGTTTTTGAAATAATTTCCCTTCATATGTTATTGACTTGATCT | |
| | | | | TTCCATATTTGCTTTCTTCCCCATCCTTACTGTAGGGAGCTGCAACAACATGCTATGTAGCATTGCATCCA | |
| | | | | CAAGT | |
| SY4215 | SY4215F1 | GTCCAAC | | | 880 |
| | | AGGTAAG | | | |
| | | TTAAACA | | | |
| | | ACTATGA | | | |
| SY4215 | SY4215R1 | AAACGAA | | | 881 |
| | | CAATCTT | | | |
| | | GGACAAG | | | |
| | | CA | | | |
| SY4215 | SY4215A1FM | CCAAATA | A | | 882 |
| | | ACACGAG | | | |
| | | TACT | | | |
| SY4215 | SY4215A2TT | TAACACG | T | | 883 |
| | | AGTTCTC | | | |
| | | GT | | | |
| SY4322 | | | | TAGAAATTTCTTTATCTTTATTCATAGGGTAGAAATATTGGTAGTAGAACCCAACTGTGATTTCAACCGCA | 560 |
| | | | | ACCTCGTCATAAAATCCAACAAATGTGATCTCCTCTGCCACCATNGCGGCAAAATCCAATGAGCCCCAAC | |
| | | | | TCCTGGCAAACCTCATCATGAAACCCCACATGAAATCCAACTGCGAATCCAGTCGTGTGAAACCTACTGA | |
| | | | | AGTCCACCAAACAGTTTTTCTTTTCTTCATGTTGTGGTTTGATTTTTTGTTGTTAAGATTTTGATGGTTCAT | |
| | | | | ATCTATTCTTTTATCCAGCTTGTTTTTATTTAGTCCACCCACCAGGGGAAAAANTGAGTGGTGAGATATA | |
| | | | | ATGAAGATGAAGGGTGATGGAGACAGATAGGAGAAAGAAGAAAGNGGCAATACGACATCATTTTTATT | |
| | | | | TTTTTAAAAAACTTTTTTCCATGTATAATTTCCAATCAGACAAAGAGTACACGTAATATCACACGTGGCAT | |
| | | | | GCATCATG[A/G]CCNATTANCGATCATGTAGGTAGATAATAATTTTGGACTAACAGAAAATATCCGAGA | |
| | | | | CAAAAAATTTTACGACTTCAAAATTGTAAGGTATTTTTATTACGATTTCAAAGTCATAAGTTTTGTTTTTAT | |
| | | | | TTTCTATTTTTCTTTTTACGATTTTGTAGTCATTTTGGTTTTCTTTTTACTTTTAAATTTTTTTATTTTCTTGTA | |
| | | | | TTATATTTTTTATTTTTTAAATTTTTTTAATAATTTTATTTATTTAATTATTAAACAAATATTTTATTTATTCAT | |
| | | | | TTTAAAAAATTAAAATTCAATAAAATTATTAAAATATTATCTAAATTTTAAATATACAAAATATATTAAATA | |
| | | | | AAAAATATTAAAATGGAAAACTTTGATAGTATTAGTTTTATTTAATTTATTGTATATTTTTTATGGGTTTAT | |
| | | | | TTAATATGTTATATATTTTTTAATGTTTTTTTATTTAAAATATATTATGTTTTCTAATATTGTTTTATTTAATT | |
| | | | | ATT | |
| SY4322 | SY4322F1 | ACAAAGA | | | 884 |
| | | GTACACG | | | |
| | | TAATATC | | | |
| | | ACACG | | | |
| SY4322 | SY4322R1 | GTCTCGG | | | 885 |
| | | ATATTTTC | | | |
| | | TGTTAGT | | | |
| | | CCAA | | | |
| SY4322 | SY4322A1FM | CATGCAT | A | | 886 |
| | | CATGACC | | | |
| SY4322 | SY4322A2TT | CATGCAT | G | | 887 |
| | | CATGGCC | | | |
| SY4344 | | | | CTTAATTTTCTTATTTTTATTTCTTTCCTTAATTCATTTAGCCTTATGCATATTGTTATTTATATTGAATTAGC | 561 |
| | | | | TAATCTTAATTAATTCCAAATATTCAGTGTAGAAATTTCTTTATCTTTATTCATAGGGTAGAAATATTGGTA | |
| | | | | GTAGAACCCAACTGTGATTTCAACCGCAACCTCGTCATAAAATCCAACAAATGTGATCTCCTCTGCCACC | |
| | | | | ATNGCGGCAAAATCCAATGAGCCCCAACTCCTGGCAAACCTCATCATGAAACCCCACATGAAATCCAACT | |
| | | | | GCGAATCCAGTCGTGTGAAACCTACTGAAGTCCACCAAACAGTTTTTCTTTTCTTCATGTTGTGGTTTGAT | |
| | | | | TTTTTGTTGTTAAGATTTTGATGGTTCATATCTATTCTTTTATCCAGCTTGTTTTTATTTAGTCCACCCACCA | |
| | | | | GGGGAAAAANTGAGTGGTGAGATATAATGAAGATGAAGGGTGATGGAGACAGATAGGAGAAAGAAG | |
| | | | | AAAG[A/G]GGCAATACGACATCATTTTTATTTTTTTAAAAAACTTTTTTCCATGTATAATTTCCAATCAGA | |
| | | | | CAAAGAGTACACGTAATATCACACGTGGCATGCATCATGNCCNATTANCGATCATGTAGGTAGATAATA | |
| | | | | ATTTTGGACTAACAGAAAATATCCGAGACAAAAAATTTTACGACTTCAAAATTGTAAGGTATTTTTATTAC | |
| | | | | GATTTCAAAGTCATAAGTTTTGTTTTTATTTTCTATTTTTCTTTTTACGATTTTGTAGTCATTTTGGTTTTCTT | |
| | | | | TTTACTTTTAAATTTTTTTATTTTCTTGTATTATTTTTTATTTTTTAAATTTTTTTAATAATTTTATTTATTT | |
| | | | | AATTATTAAACAAATATTTTATTTATTCATTTTAAAAAATTAAAATTCAATAAAATTATTAAAATATTATCT | |
| | | | | AAATTTTAAATATACAAAATATATTAAATAAAAAATATTAAAATGGAAAACTTTGATAGTATTAGTTTTAT | |
| | | | | TTAAT | |
| SY4344 | SY4344F1 | AAGGGTG | | | 888 |
| | | ATGGAGA | | | |
| | | CAGATAG | | | |
| | | GA | | | |
| SY4344 | SY4344R1 | CGTGTAC | | | 889 |
| | | TCTTTGTC | | | |
| | | TGATTGG | | | |
| | | AA | | | |
| SY4344 | SY4344A1FM | CGTATTG | G | | 890 |
| | | CCCCTTTC | | | |
| SY4344 | SY4344A2TT | ATGTCGT | A | | 891 |
| | | ATTGCCT | | | |
| | | CTTTC | | | |
| SY4360 | | | | ATGGCATTGGCTCTTACTCCAACAGTTGTCTTTGGCTCAATAGCCTTTGCAGTTTTCTGGGTTCTAGCAGT | 562 |
| | | | | TTTCCCATGTGTGCCTTTTCTACCCATTGGGAGAACTGCAGGGTCCCTACTAGGTGCAATGTTTATGGTC | |
| | | | | ATATTCAAAGTTCTTAATCCAGATCAAGCTTTTGCTGCAATTGATCTCCCAATTCTTGGTCTTCTTTTTGGG | |
| | | | | ACAATGGTTGTTACTGTTTTTCTTGAAAGAGCAGACATGTTCAAGTACTTGGGGAAATTGCTCTCTTGGA | |
| | | | | AAAGCCAAGGACCAAAGGACTTACTCTGTAGAATTTGTTTAATTTC[A/T]GCTATATCAAGTGCNTTTTTC | |
| | | | | ACCAATGACACATCTTGTGTTGTATTGACTGAATTTGTGTTGAAAATAGCAAGGCAACATAACCTCCCAC | |
| | | | | CTTACCCTTTCCTTCTTGCACTAGCTTCAAGTGCTAATATTGGATCCTCAGCAACCCCAATTGGGAACCCC | |
| | | | | CAGAATCTAGTTATAGCTATTCAAGGTAAAATATCATTTGGGAGCTTTCTCACTGGTATTCTTCCAGCTAT | |
| | | | | GCTTGTAGGAGTTGTGGTGAATGTTGTAATTCTTATAGCCATGTATTGGAAGGTGTTAACTATTCATAAG | |
| | | | | GATGAAGAGGATCCAATTTCAGAAGTTGCTGAAGAGGAGTTTGTTTCCCATCAGTTTTCTCCAGCCACAA | |
| | | | | TGTCACATTGTGCATCCTTTAATTCTCATGAATGCAATGACAGTCTAGAACCTACTAATGGTCTTCAAAAC | |
| | | | | CCTTCTCAAGTACATCCTATCAGAAACCAAACAACTCCAAGTGTAACTGAAGTTCAGATGGTTCTTAGTA | |
| | | | | GCACAAAGGATTCCACAACAAATGCATCCAAGATGGGGANAAATGATGCAAAGGAGGAAACTAATCCT | |
| | | | | TCAAAAGTTGTTGCAATAGTAGTAGATAAACCTATAGAAGCACATGTTATGCACTCTTCACAAGGAAAG | |
| | | | | GTGGACTATTTGAGAAAAAA | |
| SY4360 | SY4360F1 | GGGAGGT | | | 892 |
| | | TATGTTG | | | |
| | | CCTTGCT | | | |
| SY4360 | SY4360R1 | GCCAAGG | | | 893 |
| | | ACCAAAG | | | |
| | | GACTTAC | | | |
| SY4360 | SY4360A1FM | TTTGTTTA | A | | 894 |
| | | ATTTCAG | | | |
| | | CTATATC | | | |
| SY4360 | SY4360A2TT | AATTTGTT | T | | 895 |
| | | TAATTTCT | | | |
| | | GCTATATC | | | |
| SY4208 | | | | CAGCTGAGGCTGCAACTCGTGCTCCAAGCAATAGAACAGTTGGTACATTTGAAGCCAAATTTGATAGNA | 563 |
| | | | | NAAGTATAACTATAGCCAGTATAGCTATTCCACTAGCATGATCTATTCGAGAATAAGGCTCCATTAAGTC | |
| | | | | CCAAAGAGCACCTGGAATTCCAGTTTTCTTGAATCCATCTACTGTGATAAACATTCCACAAAAGAATATC | |
| | | | | AACAGTGAATAAGAGACCTTGTCTATGCTTGGCCCTGCATCTTTGAAATCAAGAACCACCAAAGTTATTG | |
| | | | | CAGCTGCAATTGCAGCCCATGCCATATTTGCACCAAGAAGCATTGCAATCACCATTATCAACGTGATTGC | |
| | | | | ATAAACACAAGATTTCCACACTATCCTTTTCCATTTTTTTCTCAAATAGTCCACCTTTCCTTGTGAAGAGTG | |
| | | | | CATAACATGTGCTTCTATAGGTTTATCTACTACTATTGCAACAACTTTTGAAGGATTAGTTTCCTCCTTTGC | |
| | | | | ATCATTT[A/G]TCCCCATCTTGGATGCATTTGTTGTGGAATCCTTTGTGCTACTAAGAACCATCTGAACTT | |
| | | | | CAGTTACACTTGGAGTTGTTTGGTTTCTGATAGGATGTACTTGAGAAGGGGAAGACCATTAGTAG | |
| | | | | GTTCTAGACTGTCATTGCATTCATGAGAATTAAAGGATGCACAATGTGACATTGTGGCTGGAGAAAACT | |
| | | | | GATGGGAAACAAACTCCTCTTCAGCAACTTCTGAAATTGGATCCTCTTCATCCTTATGAATAGTTAACACC | |
| | | | | TTCCAATACATGGCTATAAGAATTACAACATTCACCACAACTCCTACAAGCATAGCTGGAAGAATACCAG | |
| | | | | TGAGAAAGCTCCCAAATGATATTTTACCTTGAATAGCTATAACTAGATTCTGGGGGTTCCCAATTGGGGT | |
| | | | | TGCTGAGGATCCAATATTAGCACTTGAAGCTAGTGCAAGAAGGAAAGGGTAAGGTGGGAGGTTATGTT | |
| | | | | GCCTTGCTATTTTCAACACAAAT | |
| SY4208 | SY4208F1 | GTGCATA | | | 896 |
| | | ACATGTG | | | |
| | | CTTCTATA | | | |
| | | GGTT | | | |
| SY4208 | SY4208R1 | AGCACAA | | | 897 |
| | | AGGATTC | | | |
| | | CACAACA | | | |
| SY4208 | SY4208A1FM | CTTTGCAT | A | | 898 |
| | | CATTTATC | | | |
| | | CC | | | |
| SY4208 | SY4208A2TT | CCTTTGC | G | | 899 |
| | | ATCATTT | | | |
| | | GTC | | | |
| SY4210 | | | | TTTTTTCTCAAATAGTCCACCTTTCCTTGTGAAGAGTGCATAACATGTGCTTCTATAGGTTTATCTACTACT | 564 |
| | | | | ATTGCAACAACTTTTGAAGGATTAGTTTCCTCCTTTGCATCATTTNTCCCCATCTTGGATGCATTTGTTGTG | |
| | | | | GAATCCTTTGTGCTACTAAGAACCATCTGAACTTCAGTTACACTTGGAGTTGTTTGGTTTCTGATAGGAT | |
| | | | | GTACTTGAGAAGGGTTTTGAAGACCATTAGTAGGTTCTAGACTGTCATTGCATTCATGAGAATTAAAGG | |
| | | | | ATGCACAATGTGACATTGTGGCTGGAGAAAACTGATGGGAAACAAACTCCTCTTCAGCAACTTCTGAAA | |
| | | | | TTGGATCCTCTTCATCCTTATGAATAGTTAACACCTTCCAATACATGGCTATAAGAATTACAACATTCACC | |
| | | | | ACAACTCCTACAAGCATAGCTGGAAGAATACCAGTGAGAAAGCTCCCAAATGATATTTTACCTTGAATAG | |
| | | | | CTATAACTAGATTCTGGGGGTTCCCAATTGGGGTTGCTGAGGATCCAATATTAGCACTTGAAGCTAGTGC | |
| | | | | AAGAAGGAAAGGGTAAGGTGGGAGGTTATGTTGCCTTGCTATTTTCAACACAAATTCAGTCAATACAAC | |
| | | | | ACAAGATGTGTCATTGGTGAAAAA[A/G]GCACTTGATATAGCNGAAATTAAACAAATTCTACAGAGTAA | |
| | | | | GTCCTTTGGTCCTTGGCTTTTCCAAGAGAGCAATTTCCCCAAGTACTTGAACATGTCTGCTCTTTCAAGAA | |
| | | | | AAACAGTAACAACCATTGTCCCAAAAAGAAGACCAAGAATTGGGAGATCAATTGCAGCAAAAGCTTGAT | |
| | | | | CTGGATTAAGAACTTTGAATATGACCATAAACATTGCACCTAGTAGGGACCCTGCAGTTCTCCCAATGGG | |
| | | | | TAGAAAAGGCACACATGGGAAAACTGCTAGAACCCAGAAAACTGCAAAGGCTATTGAGCCAAAGACAA | |
| | | | | CTGTTGGAGTAAGAGCCAATGCCAT | |
| SY4210 | SY4210F1 | GCCAAGG | | | 900 |
| | | ACCAAAG | | | |
| | | GACTTAC | | | |
| SY4210 | SY4210R1 | GGGAGGT | | | 901 |
| | | TATGTTG | | | |
| | | CCTTGCT | | | |
| | | AT | | | |
| SY4210 | SY4210A1FM | CTATATC | G | | 902 |
| | | AAGTGCC | | | |
| | | TT | | | |
| SY4210 | SY4210A2TT | CTATATC | A | | 903 |
| | | AAGTGCT | | | |
| | | TTT | | | |
| SY4207 | | | | AAAAGTTCCCTGCTATAGTGCTAACCCAAGCTAAGATTAGCCATGCCCTCTCCTCATCTCCTTTGGAAATT | 565 |
| | | | | GCAGCAGCTGAGGCTGCAACTCTTGCTCCAAGCAATAGAACTGTTGGTACGTTTGAAGCCAAATTTGAT | |
| | | | | AGGACAAGTATAACTATAGCAAGTATAGCTGTTNCACTAGCATGATCTATTCGAGAATAGGGCTCCATT | |
| | | | | AAGTCCCACATAGCACTAGGAATTCCAGTGGACTTAAAGCCCTCTACTGTGATAAACATTCCACAGAAGA | |
| | | | | ATACCAAAAGTGAATATGAGACCTTGTCTAAGCTTGGCCCTGCATCTTTGAAATCAAGAACCACCAAAGT | |
| | | | | TATTGCAGCTGCAATTGCAGTCCATGCCATATTCAAACCAATGAGCATTGCAATCAACATTACTAGTGTG | |
| | | | | ATTGCATAAACACAAGATTTCCACAGTACCCTCTTCCATTTTTTGTTCATATAGTCCTTTTCTCCTGAAGAG | |
| | | | | AGTATAACA[A/T]GTGCTTCAATAGGTTTATCCACTACTATTGCAACATTTTTTGAAGGATTAGTTTCCTC | |
| | | | | CTTTGTATCATTTGTCCCTTCCTTGGATGCATTTGAGTTTGTTGTGAAATCCTTTGTGCCACTATGAACCAT | |
| | | | | CTGAACTTCACTTTCACTTGGAGTTGATTGGTCTCTCATAACATGAACTTGGGAAGAGTTTTGAATACTAT | |
| | | | | TAGCAAGTTCTACACTGCCATTGCATTCTTGAGAATTAAAGGATGTAAAATGAGACATTCTGGCTGGAG | |
| | | | | AAAACTGATGAGAAACAACCTCCTCATCCACTACNACTTCTGAAACTGGATCCTCTTCATCCTTAGGACA | |
| | | | | AGATAGTACCTTCCAATACATGGCTATAAGAAATACAACATTCACCACAACTCCTACAAGCATAGCTGGA | |
| | | | | AGAATACCTATCAGAAACCTCCCAAATGATATTTTACCTTGAATAGCTATAACCAAATTCTGGGGGTTCC | |
| | | | | CAATTGGGGTTGCTGAGGAT | |
| SY4207 | SY4207F1 | CCAAGGA | | | 904 |
| | | AGGGACA | | | |
| | | AATGATA | | | |
| | | CAAAG | | | |
| SY4207 | SY4207R1 | TGCAGTC | | | 905 |
| | | CATGCCA | | | |
| | | TATTCAA | | | |
| | | AC | | | |
| SY4207 | SY4207A1FM | CCTATTG | T | | 906 |
| | | AAGCACA | | | |
| | | TGT | | | |
| SY4207 | SY4207A2TT | ACCTATT | A | | 907 |
| | | GAAGCAC | | | |
| | | TTGT | | | |
| SY4278 | | | | GATGTACATGTAGAATTTCACAAAGCATAAATTGTATTTTATGTAACATATTGTTCTTGGTAGACAGGAA | 566 |
| | | | | AGAAATTGCAGAAATGAAAAGAAGACTAGCAGCACAAATATATGGCATACTCCCTAGCTATCATATCAA | |
| | | | | CCAAAAGGATACGTATATACGAGCAAATGCACACAACCTATCATATCAACCAAAAAAAGGATATATGAC | |
| | | | | TCATGTCAGAAGGTGGAGTTTCAATTCCAACATGGTAACGTTGTTCTCACCATGAACTCCCATTTTTGCAA | |
| | | | | AAAAATATGCTCCCAAGTTTGTCTCTCTAAGAACATGGCCAACAGAGCAATCCCTCAAAAGTTGTAGCAA | |
| | | | | GATACGGATGTCTGCTATGATAACCGGCCTCTCCTAAAGGTGAGAAGATGAGTGTGATAGGAAGTGATC | |
| | | | | AACTAGACCAGACACNNNNATAGATGATAGACTTATTAGGTTATTAACTAGCTAGGTTAAACATTAACT | |
| | | | | ACAACAAAACAAT[A/G]AGTGATTGAATAACTATCAACAAGCGACTTATATTTCATCAAATTGTGATTTT | |
| | | | | TTTGGAACCCATAAGAGAGATCTAAAGAAAATTTGTCGAATACTTCTATACTGAATAGATATTCGGTCAA | |
| | | | | AATAGCAGGATAGGTGTTCGGCTCACTACGAGACAAAAAGAGTCCTAAGTAAGAAGCAATGAAGATTA | |
| | | | | AGCCCTTAATCATAGAATCATATATATCACCTAAAAATGGCAATCACCCNNNNGAAAGTTCAAGGGCCA | |
| | | | | AGGTTNAAAAATGTTAGTATAATTAAATAAAAATGAGATGTTTAAGGTAAAGGTAGCTGTTCACCCTCAT | |
| | | | | TTATTAATGATATTTATTACTCTGAACTGGAATCTTACTTGAATTCAGAATGNNNTTTTTTTTTNCACNGA | |
| | | | | TACTCANTTTTTAAAGTATTACTTCATCGATCGAATACTAAAAGAAAACATATTAAAGTAAAAAACACAA | |
| | | | | AAAAAAAGAGAAGGTATCTGATCATCTTTTGGT | |
| SY4278 | SY4278F1 | AACCGGC | | | 908 |
| | | CTCTCCTA | | | |
| | | AAGG | | | |
| SY4278 | SY4278R1 | TTGATGA | | | 909 |
| | | AATATAA | | | |
| | | GTCGCTT | | | |
| | | GTTGATAG | | | |
| SY4278 | SY4278A1FM | TATTCAAT | G | | 910 |
| | | CACTCATTG | | | |
| SY4278 | SY4278A2TT | TTATTCAA | A | | 911 |
| | | TCACTTAT | | | |
| | | TGT | | | |
| SY4255 | | | | TATATAATAGAAAGTCACCTTTCAGCATGTGGTATGAAGTTTTCGTGATAGGTTTTCAGCTTTAAGGATG | 567 |
| | | | | CIGCAGTTCTCTTCTCTTATTTTCCAAATAGATTAAAATATTTCTAAATCTCAATCCCGAAAAAGACTTACA | |
| | | | | AAACGTTTATAGCTTTTTCATGAAGTAAATCCAATGCAAGGACTGCAAGGTGTGGAATTCCAAGTTATAT | |
| | | | | CGAAGCCCATGAANGAATTTTCTTTATAAGGTAAGACTANGATGTAAAAAAGTTTGATAAACGTTTTTGC | |
| | | | | TGTTTTCCTTTTGCAGTTTTATTAAATTAAACGTTATGTATGATTANTTTGATGATTATTTGCACAATATGT | |
| | | | | TTACGTACTATGCATGACCACATAAATTAAAATGAAATAAAGAGAATATGGGATTTCANCGTTATCTTTG | |
| | | | | AGATGCAACGTATTTGTAAATATATTGTTTTAAATATTAATATATATGCTGATTTTACTGAATAANTTTTTT | |
| | | | | ACGT[A/T]TGCTAGCTCTTAATTGTTTTCCATTTCTGGGTTGTATTATGGGTCCTTTTATTTACTTAGAGTA | |
| | | | | GGCTTGTTTATGAAGGAAGTGAATATTCGTGCATTTTGAGATTTTGATCACNTTNTGGGATATAGCACAT | |
| | | | | CATTTAGGTCGTTGAAAGTGTATATNACACTGTCATATTATATAAAAGTNAGNTTTTTTTTTTAAAAAAAA | |
| | | | | TATTACTNAAAGTGTAATCTGCCAATTATTTTAGTCNAAGTTTATATAGATGAGTAGGGTTTAATGATTTT | |
| | | | | TGCTGGGTTTGATGATTAGGGTAATAGTTTACATAGAGGGTTTATTTTTGGGGTGCATATATTTAGGCTA | |
| | | | | GAGGATTCATCATTTTACATAACTATTGAGCTAGTTGTGTNAGGGGCAAGTATTCCTTGTACCCTTCATCT | |
| | | | | TCTTCCTTATATTAATAATGTTTGCTCTTAGCCNATAAACAAAAAATAGTTTAAATTTCANAATATCATTAC | |
| | | | | TTAAATGATAA | |
| SY4255 | SY4255F1 | ATCTTTG | | | 912 |
| | | AGATGCA | | | |
| | | ACGTATT | | | |
| | | TGTA | | | |
| SY4255 | SY4255R1 | CAACGAC | | | 913 |
| | | CTAAATG | | | |
| | | ATGTGCT | | | |
| | | ATATCC | | | |
| SY4255 | SY4255A1FM | TTTTACGT | A | | 914 |
| | | ATGCTAGC | | | |
| SY4255 | SY4255A2TT | TTTACGTT | T | | 915 |
| | | TGCTAGC | | | |
| SY4300 | | | | TTTTAAATATTAATATATATGCTGATTTTACTGAATAANTTTTTACGTNTGCTAGCTCTTAATTGTTTTCC | 568 |
| | | | | ATTTCTGGGTTGTATTATGGGTCCTTTTATTTACTTAGAGTAGGCTTGTTTATGAAGGAAGTGAATATTCG | |
| | | | | TGCATTTTGAGATTTTGATCACNTTNTGGGATATAGCACATCATTTAGGTCGTTGAAAGTGTATATNACA | |
| | | | | CTGTCATATTATATAAAAGTNAGNTTTTTTTTTTAAAAAAAATATTACTNAAAGTGTAATCTGCCAATTAT | |
| | | | | TTTAGTCNAAGTTTATATAGATGAGTAGGGTTTAATGATTTTTGCTGGGTTTGATGATTAGGGTAATAGT | |
| | | | | TTACATAGAGGGTTTATTTTTGGGGTGCATATATTTAGGCTAGAGGATTCATCATTTTACATAACTATTGA | |
| | | | | GCTAGTTCTGTNAGGGGCAAGTATTCCTTGTACCCTTCATCTTCTTCCTTATATTAATAATGTTTGCTCTTA | |
| | | | | GCC[A/G [symbol] ATAAACAAAAAATAGTTTAAATTTCANAATATCATTACTTAAATGATAATATTAATATATTTAA | |
| | | | | GAACAAAGGAAACAGNTACGTTTAGGAGCNNNNTTATTTGACATTTTAGGAACTTTNAAAAAAATGAA | |
| | | | | AATTTGAGAATTTAACGTGACTATATTTACACTTTCAGACCAAAATGGTGTTTTATCNNNNNTTTTATAGT | |
| | | | | CCTATCGGGCTAGAACCTACCCCATATGTAGTTTAATTTCCTCCATGTTAACTATGTAACTACTCTATTTTG | |
| | | | | TTTGTTTGCACCTACCAAGTATGGCACATAGCAANNTTTAAAAAAGAAATTAGTGGCCCTTATGCACTAT | |
| | | | | TTTCTTTTTGAAAGGGGAAAAGAAAAAGGAAACTAATACATAGCTNGAGTACATCTTTGATGTCGTTATA | |
| | | | | GTGTTTGAATAACAAGAGATTTGGATTTAGTAATTATATGGAGGATGCACNNNATGATGTAGTTGGAAA | |
| | | | | ATATCTTATCTTATTAAATAT | |
| SY4300 | SY4300F1 | GCAAGTA | | | 916 |
| | | TTCCTTGT | | | |
| | | ACCCTTC | | | |
| | | ATC | | | |
| SY4300 | SY4300R1 | TTGGTCT | | | 917 |
| | | GAAAGTG | | | |
| | | TAAATAT | | | |
| | | AGTCACG | | | |
| SY4300 | SY4300A1FM | TTGCTCTT | A | | 918 |
| | | AGCCAATA | | | |
| SY4300 | SY4300A2TT | TGCTCTTA | G | | 919 |
| | | GCCGATA | | | |
| SY4301 | | | | CCTAGATTTAATAAAAATATNTGTCAGTATTNAAAAAAAATCTCGTGCTTTTTATTTGATTGCTGAAGAA | 569 |
| | | | | AAAAATTANCAATTATGTAGTATAAGTTANAAAAAAANTCATATTCTCCCTCAACAAGAAATTATAGTTA | |
| | | | | ATAAGAGTTTCAAAAAAGTTACTATAATGATCAACCAGCTTATTTTATGTGATAATTTATTATTAAATTAT | |
| | | | | ATAAAATTATTTTATATTATCAGTGTATAATTTATTTTNNAAAAAAAAATACATAAATAGTTTATTGTGTC | |
| | | | | AGATAAATTCTGATTGGAAGCTATTAAAGTTGCCCTTTAGAACTTTTATATATTTTCCAGTGTGCACATAT | |
| | | | | ANAAAAGAGGGTCACCTTTCACCTAGTGGTATGAAGTGGAAGTGTCTTGAACAATAGTCTTCANNNNN | |
| | | | | GAGGATGCTGCAATTCTCTTCCACCATTTNCCAAACAAATTAAAATGTTTCTGAATCCAATTTGGAAACCA | |
| | | | | AAAAGTTC[A/G]TAGCTTTTCATAGAGCTTTCAAGTAATTAGCCCCGTGAAATATTTTTCTTTTTACGCAA | |
| | | | | GATGACACCACGGGCCTTCTAACTGAAACAAGCAATAATAATAACAGGCCAAGGAAAAACTCAGCAGC | |
| | | | | ATTCTGTTAGAAGGAAAACACTTATCTCTATTAGCATATTTNTCTCCATTAATCTCTTACTTCAGTCCTCTA | |
| | | | | TCAGGTAAGAGTAGGACGTAAAATGTGTGATAGATGTTTGTGTTATTGTTTTCCTTTTCCAGTTCTGTTGA | |
| | | | | ATTAAATGCTGTATTATATGATATCCTTGCTGCTAATATGCTTAACTGAATGAGTTTTTTACGTATGCTCTA | |
| | | | | CGTGTTTTCCAATTCTTGCTTTTTCTAAAAGAATTTCTTGAACCTCCCCTCATATTTCCTTTGTGAACTTACC | |
| | | | | AGATTTCATGCATTTTGAGAGTCATAGAATTTCTTATTATAGTTAGGCCGATTCTGCTAGAATCTAGCTAC | |
| | | | | TGCATGCATGTACT | |
| SY4301 | SY4301F1 | GCTGCAA | | | 920 |
| | | TTCTCTTC | | | |
| | | CACCATT | | | |
| SY4301 | SY4301R1 | CGTGGTG | | | 921 |
| | | TCATCTTG | | | |
| | | CGTAA | | | |
| SY4301 | SY4301A1FM | TCTATGA | G | | 922 |
| | | AAAGCTA | | | |
| | | CGAACTT | | | |
| SY4301 | SY4301A2TT | CTCTATG | A | | 923 |
| | | AAAAGCT | | | |
| | | ATGAACT | | | |
| | | TT | | | |
| SY4244 | | | | TGAGGCTGCAACTCTTGCTCCAAGCAATAGAACTAGAAAACATATGAATAGAAGATTGTGATGCATCAA | 570 |
| | | | | ATGAAAATGGCTCTTGCTAAGTATGGATATAAAAAAAAAAAATACTGGTAGTTTAGACAAGAAATGAAT | |
| | | | | GTGAACCTTCATTATGACTAAATCTAGATTGCATATATGTATTATGACTTAACATTGCATACTTTTTTTTGC | |
| | | | | CCATGACAATTGAAAATTTTAGGGAAAATATAATCCTAACATATTTCTTTTTGTATGCTACTATAGTTTAT | |
| | | | | ATCAAACTTGGTTTAAAANTTTAAAATTGACTAATGTCAAACACATAAATTTAACATTATATCTTATAGCA | |
| | | | | GTCATGAAAGTTCAAATTAATTAAAAAAATGCTNCATGTTACGTATANCTAATTCTNGGAAACAATATAA | |
| | | | | GNCATGCATAACAGAAGCCATTTGAAGATTTACCATTCACTAATTGTCATTTAAGCAAGGTAAAAAAAAT | |
| | | | | TAGTAGAC[A/C]GTCTTTTAATCATGAATCGAACATAAAATAGATGGGTAACATATAAATAAACAAGTTG | |
| | | | | TACCAGAAAAATAATTATTTTGGCAGGAAGATCATGCACTTACCTGTTGGTACGTTTGAAGCCAAATTTG | |
| | | | | ATAGGACAAGTATAACTATAGCAAGTATAGCTGTTNCACTAGCATGATCTATTCGAGAATAGGGCTCCA | |
| | | | | TTAAGTCCCACATAGCACTAGGAATTCCAGTGGACTTAAAGCCCTCTACTGTGATAAACATTCCACAGAA | |
| | | | | GAATACCAAAAGTGAATATGAGACCTGTTCCAAGAAGAAAATCACTTTAAGAGATTGTTCGAAGTTCAG | |
| | | | | TTGGCACAAGAATAACAATAGCTAGCATTTCAAATGGAAAAGAGAGAAAATGAGGTTTTGTACAAGNG | |
| | | | | GTTGTGTTATATAAGCTTTACCTTGTCTAAGCTTGGCCCTGCATCTTTGAAATCAAGAACCACCAAAGTTA | |
| | | | | TTGCAGCTGCAATTGCAGTCCATGC | |
| SY4244 | SY4244F1 | AACAGAA | | | 924 |
| | | GCCATTT | | | |
| | | GAAGATT | | | |
| | | TACCA | | | |
| SY4244 | SY4244R1 | GTGCATG | | | 925 |
| | | ATCTTCCT | | | |
| | | GCCAA | | | |
| SY4244 | SY4244A1FM | CATGATT | C | | 926 |
| | | AAAAGAC | | | |
| | | GGTCTA | | | |
| SY4244 | SY4244A2TT | TTCATGA | A | | 927 |
| | | TTAAAAG | | | |
| | | ACTGTC | | | |
| SY4295 | | | | TAATAAAATAAAATAAATAAAATGACTTATCAAATTTTAAGTTTTCTATAAGTTTTTAGAATATTTTATTTT | 571 |
| | | | | TATTGATTAANTATTTTACTAATTTTATTNCACTTTTTTGAAANTGAGTAAAAAACAAAAATAAAAAATNT | |
| | | | | ATATANNATTTAATTTTAAACTGGATAAATAATTTGATGAATGAGTCTTTTTTTTAGCCAATAAGTGCAT | |
| | | | | CTTTTATTGATTTGATTTACATTATATTTTATTTAATCTGTCACNNCATGTAACTGATGGAGATGGCATCCC | |
| | | | | CATCTTTGGTTCTAGTCATCACTTATGGATTGACCACAACGACTCACTCTTCAATTGCACTGATGGCCTAA | |
| | | | | TTGGTGCTGTTATGGGCTCCACTGCCATTACCATTTCCAACAACTGCTTCATCCCCTAACTAGGTCGATCT | |
| | | | | ACTAATTAATAGTCCTTTTGGTTAAAATATTTGAAGGAATTCTCTCATCATGTGTTTACTTTGTTTTAACCA | |
| | | | | AGTA[A/G]TACGNCCATAGAGAGNTAGTGTTGAGTTTATTGACTTCAAAATTATTCAGGTTATGCTACTG | |
| | | | | GCTCAACGTGACTCTTATGTCCACGATCAGCATATGCAAGGAATCAATGCATACAACCATTTCGGGGAG | |
| | | | | AATCTTAACCAAAGAATGCCCAGGTAATTAACTAACATCTTTTANGTAGTAGTAGTATCTCTAGATATTTT | |
| | | | | ACTTTTTTTTTTNNAATTGTATATGTCATTCCATCTAACATTTTGTTCAATTCTATGATAATAATTTTTATTA | |
| | | | | CTTATTATTTTTAAAAATAGNCTTAGTTACTATTTTGNTCTTNTAATTTAATTTTNAAGTTCAATTTGATTC | |
| | | | | TCTTAATATTAAAAAGTTNAATTTNNTCCTCTNANNNNNNTTTTTTTAAATGACTTAATTAGNTCCTTTTA | |
| | | | | CTTTTAGAAGTTTCAATTAAGTCATTTATTTTTTAAAATAGGTTCAATTTGATCTTATTTTTCTTTCATGTGC | |
| | | | | TNCAANTTT | |
| SY4295 | SY4295F1 | GAAGGAA | | | 928 |
| | | TTCTCTCA | | | |
| | | TCATGTG | | | |
| | | TTTAC | | | |
| SY4295 | SY4295R1 | TGAGCCA | | | 929 |
| | | GTAGCAT | | | |
| | | AACCTGAA | | | |
| SY4295 | SY4295A1FM | TGTTTTAA | A | | 930 |
| | | CCAAGTA | | | |
| | | ATACG | | | |
| SY4295 | SY4295A2TT | TTGTTTTA | G | | 931 |
| | | ACCAAGT | | | |
| | | AGTAC | | | |
| SY4254 | | | | TTGAAATGATTANGTGAATNTAAGCAAAAAATGTCGCGTTAAATTCGTATGTTTGTTATTATTTTTCTTGT | 572 |
| | | | | GGTATAATTTTTATTGTGTTTTTATAATCTTTCGTGTGAAGATTGATTATCCAACACATTTTTAATTATAGGT | |
| | | | | ATGTCCTACATTTGTCTCTATCCAAAATCCTCATGCCTTTAATTTGATANGAATACATGTTTCAACAGCTTC | |
| | | | | TTACAAACNNATATNNAATCTTATAAATATATTCTTTATTATTAATTAAAATTTATAAATTTCACTTCTTAT | |
| | | | | TTAAAAAATTAATATCACTCATAATTTTATAATTTTATTAATAAAAAATATATTAAGAAAAATGTGTTNAA | |
| | | | | AAATATCTCAAATAATAATGATTGGAAGCTATTACTAAAGTTGCCGCATATGACTTTTATAATCCAGAGT | |
| | | | | GTCCGTATAAATAGAGGGTCCACTTTCACCAAGTAGNACCAAGTTAAGTTGCCTCTTATGACTTTTATAC | |
| | | | | TC[*/A]AAGAGTGTACATGAAAAGTGCAAAGAGAGGGTCACTTTTCGCCAAGTGGTATTACACAGTTGC | |
| | | | | CGCTTATGACTTATCCTTTCTCACCAGGTTGCTAGCATGGAAGAAGTGTACTTAATTAGTGTGCACANAT | |
| | | | | ATAAATAGAGGGTCACCTTAATTTCTCATTCTCACACCAAGTANTAGTGTCTTGACAAGTTTTCAGCTCTG | |
| | | | | TTGCAATTCCCTCTTCNACCATTTTGCTAGCAAACTCACATTTTTATACTCAATCCAATTCAGAAAAAAACT | |
| | | | | CTTANAAAAGTTCATATAGCTTTTCATGGAGCCTTCAAGTTATTAAGGTAAGAATAGCGAGTAAAGTGTG | |
| | | | | TGCATGATAAGTGTCTNTGTTGTTTTTCTATTCCAGCTCTTTTGAATTAATTGTTATATGTATATTATATAA | |
| | | | | TATCTTTGCTTCTAATTGGATCAATTTTGTTTTCCAATATAATTCTGGCTTTCATGGGTGGTTTTGATTTAC | |
| | | | | TAATAGCGT | |
| SY4254 | SY4254F1 | GGCGAAA | | | 932 |
| | | AGTGACC | | | |
| | | CTCTCT | | | |
| SY4254 | SY4254R1 | ACCAAGT | | | 933 |
| | | TAAGTTG | | | |
| | | CCTCTTAT | | | |
| | | GAC | | | |
| SY4254 | SY4254A1FM | TCATGTA | I | | 934 |
| | | CACTCTTT | | | |
| | | GAGTA | | | |
| SY4254 | SY4254A2TT | TTCATGT | D | | 935 |
| | | ACACTCTT | | | |
| | | GAGTAT | | | |
| SY4302 | | | | AAAGAAAANTTTCTTATTACATAGATTTACTCTAATGTGAAAGAACCTANAANAGTTTTTTTACTTAAAA | 573 |
| | | | | AATCCTTCACGATACCCGCATTTGAGATGCTTTTAAGTACGTTTGTCAAAAGCTGTAAATATGTTAATGCA | |
| | | | | AATATACAATTAAGTGGTAAGTAACCTAATACGAAATGTTAATTCTTAAAACTATGTAACAAATGATAAA | |
| | | | | GCTTTTATCTGCATGGGGTGCAAAGTGTTGACATTATATATTGACACTCAATTTTGTCCAAACAAAGAAA | |
| | | | | GATGAGAAAGAATAAATTAAAAAATCGGATAGAAAATATTAATTAAAAAAATGGAGAACGTTAATGCA | |
| | | | | ATAAAGTGGTACGTACTTTAATATTTAACTGGTAAAACATCTTACTACAACAACCTATCAAATTATAAAGT | |
| | | | | AAAAGTAACGTGCAGGTGCGATGCGAGTGCTAAGTGTGATGACACTGTGTACTAGCACTCAATTTTGTC | |
| | | | | TAAAGACAAAA[A/G]GAAAGAGTTAATAATTAGAAGAAGAAAAGAGACCTTTGTTCAACATGCACACTT | |
| | | | | GTATTGCATTTTACTTCCACTGTGTTCTATGCTTTAAACTCCCACTTACATGTACATGCACCCTCTCAACAT | |
| | | | | GGACACCTGTATAATTAANTTGCATAGGTGGGATCGATTTGTTTAATTTGCTATATATTTAATTAGGTTAA | |
| | | | | TTTCTTGTTGTCTGGCTGATGAGTGATGACATTATCAGTTGGTGGAAAACACGACAATGGATGATATATG | |
| | | | | GGTCCCTTATTCTATTTTTTAAAAATACTTATCTACATAAGGTGTTTGACAACAANAAAATTGATCGAGCT | |
| | | | | CATTTTTTTCCTTTCTAGTTTTATGAATTTCAGCACTTAATTTTGTGATTTTATTCTAGAGGTTCCATCTCGT | |
| | | | | CTCATTGATTAGCTAGGAATATAATTTTTTTTATTATAAGCCAAANATATATTATTAAAATCAAACCACCC | |
| | | | | TCAGCACAAGTTGTGCAA | |
| SY4302 | SY4302F1 | GCGATGC | | | 936 |
| | | GAGTGCT | | | |
| | | AAGTG | | | |
| SY4302 | SY4302R1 | GTGCATG | | | 937 |
| | | TTGAACA | | | |
| | | AAGGTCT | | | |
| | | CTT | | | |
| SY4302 | SY4302A1FM | TAATTATT | G | | 938 |
| | | AACTCTTT | | | |
| | | CCTTTTG | | | |
| SY4302 | SY4302A2TT | ATTATTA | A | | 939 |
| | | ACTCTTTC | | | |
| | | TTTTTGTCT | | | |
| SY4253 | | | | GTAGGTGCAAACAAACAAAATAGAGTAGTTACATAGTTAACATGGAGGAAATTAAACTACATATGGG | 574 |
| | | | | GTAGGTTCTAGCCCGATAGGACTATAAAANNNNNGATAAAACACCATTTTGGTCTGAAAGTGTAAATAT | |
| | | | | AGTCACGTTAAATTCTCAAATTTTCATTTTTTTNAAAGTTCCTAAAATGTCAAATAANNNNGCTCCTAAAC | |
| | | | | GTANCTGTTTCCTTTGTTCTTAAATATATTAATATTATCATTTAAGTAATGATATTNTGAAATTTAAACTAT | |
| | | | | TTTTTGTTTATNGGCTAAGAGCAAACATTATTAATATAAGGAAGAAGATGAAGGGTACAAGGAATACTT | |
| | | | | GCCCCTNACACAACTAGCTCAATAGTTATGTAAAATGATGAATCCTCTAGCCTAAATATATGCACCCCAA | |
| | | | | AAATAAACCCTCTATGTAAACTATTACCCTAATCATCAAACCCAGCAAAAATCATTAAACCCTACTCATCT | |
| | | | | ATATAAACTT[C/G]GACTAAAATAATTGGCAGATTACACTTTNAGTAATATTTTTTTTAAAAAAAAAANCT | |
| | | | | NACTTTTATATAATATGACAGTGTNATATACACTTTCAACGACCTAAATGATGTGCTATATCCCANAANG | |
| | | | | TGATCAAAATCTCAAAATGCACGAATATTCACTTCCTTCATAAACAAGCCTACTCTAAGTAAATAAAAGG | |
| | | | | ACCCATAATACAACCCAGAAATGGAAAACAATTAAGAGCTAGCANACGTAAAAAANTTATTCAGTAAAA | |
| | | | | TCAGCATATATATTAATATTTAAAACAATATATTTACAAATACGTTGCATCTCAAAGATAACGNTGAAATC | |
| | | | | CCATATTCTCTTTATTTCATTTTAATTTATGTGGTCATGCATAGTACGTAAACATATTGTGCAAATAATCAT | |
| | | | | CAAANTAATCATACATAACGTTTAATTTAATAAAACTGCAAAAGGAAAACAGCAAAAACGTTTATCAAAC | |
| | | | | TTTTTTACATCNTAGTCTTAC | |
| SY4253 | SY4253F1 | CCCTAAT | | | 940 |
| | | CATCAAA | | | |
| | | CCCAGCA | | | |
| | | AA | | | |
| SY4253 | SY4253R1 | AGCACAT | | | 941 |
| | | CATTTAG | | | |
| | | GTCGTTG | | | |
| | | AAAG | | | |
| SY4253 | SY4253A1FM | TCATCTAT | C | | 942 |
| | | ATAAACT | | | |
| | | TCGACTAA | | | |
| SY4253 | SY4253A2TT | CTCATCTA | G | | 943 |
| | | TATAAAC | | | |
| | | TTGGACTA | | | |
| SY4247 | | | | GAAATAAAGAGAATATGGGATTTCANCGTTATCTTTGAGATGCAACGTATTTGTAAATATATTGTTTTAA | 575 |
| | | | | ATATTAATATATATGCTGATTTTACTGAATAANTTTTTTACGTNTGCTAGCTCTTAATTGTTTTCCATTTCT | |
| | | | | GGGTTGTATTATGGGTCCTTTTATTTACTTAGAGTAGGCTTGTTTATGAAGGAAGTGAATATTCGTGCAT | |
| | | | | TTTGAGATTTTGATCACNTTNTGGGATATAGCACATCATTTAGGTCGTTGAAAGTGTATATNACACTGTC | |
| | | | | ATATTATATAAAAGTNAGNTTTTTTTTTTAAAAAAAATATTACTNAAAGTGTAATCTGCCAATTATTTTAG | |
| | | | | TCNAAGTTTATATAGATGAGTAGGGTTTAATGATTTTTGCTGGGTTTGATGATTAGGGTAATAGTTTACA | |
| | | | | TAGAGGGTTTATTTTTGGGGTGCATATATTTAGGCTAGAGGATTCATCATTTTACATAACTATTGAGCTA | |
| | | | | GTTGTGT[A/T]AGGGGCAAGTATTCCTTGTACCCTTCATCTTCTTCCTTATATTAATAATGTTTGCTCTTAG | |
| | | | | CCNATAAACAAAAAATAGTTTAAATTTCANAATATCATTACTTAAATGATAATATTAATATATTTAAGAAC | |
| | | | | AAAGGAAACAGNTACGTTTAGGAGCNNNNTTATTTGACATTTTAGGAACTTTNAAAAAAATGAAAATTT | |
| | | | | GAGAATTTAACGTGACTATATTTACACTTTCAGACCAAAATGGTGTTTTATCNNNNNTTTTATAGTCCTAT | |
| | | | | CGGGCTAGAACCTACCCCATATGTAGTTTAATTTCCTCCATGTTAACTATGTAACTACTCTATTTTGTTTGT | |
| | | | | TTGCACCTACCAAGTATGGCACATAGCAANNTTTAAAAAAGAAATTAGTGGCCCTTATGCACTATTTTCT | |
| | | | | TTTTGAAAGGGGAAAAGAAAAAGGAAACTAATACATAGCTNGAGTACATCTTTGATGTCGTTATAGTGT | |
| | | | | TTGAATAACAAGAGATTTG | |
| SY4247 | SY4247F1 | TGCTGGG | | | 944 |
| | | TTTGATG | | | |
| | | ATTAGGG | | | |
| | | TAA | | | |
| SY4247 | SY4247R1 | GGAAGAA | | | 945 |
| | | GATGAAG | | | |
| | | GGTACAA | | | |
| | | GGA | | | |
| SY4247 | SY4247A1FM | TGCCCCT | T | | 946 |
| | | AACACAAC | | | |
| SY4247 | SY4247A2TT | TGCCCCTT | A | | 947 |
| | | ACACAAC | | | |
| SY4257 | | | | TTCCTTCTTTAGGAGAGAAATGACTCACATAGCATAGGATATAGATTTGGTNTAGTAATTAAGGAAATG | 576 |
| | | | | GAGTATTGATNAAATAAAAAAAACGTGATTCTTTACCNTTGAGATTAAGAGTAATGATAAAAAAANTTA | |
| | | | | TTGAAAATTAAGAGTATCTCTTATGTTTAATCGATGTGGTCTCAATCATTAGACGATATTTAATAAGATAA | |
| | | | | GATATTTTCCAACTACATCATNNNGTGCATCCTCCATATAATTACTAAATCCAAATCTCTTGTTATTCAAA | |
| | | | | CACTATAACGACATCAAAGATGTACTCNAGCTATGTATTAGTTTCCTTTTTCTTTTCCCCTTTCAAAAAGA | |
| | | | | AAATAGTGCATAAGGGCCACTAATTTCTTTTTTAAANNTTGCTATGTGCCATACTTGGTAGGTGCAAACA | |
| | | | | AACAAAATAGAGTAGTTACATAGTTAACATGGAGGAAATTAAACTACATATGGGGTAGGTTCTAGCCCG | |
| | | | | ATAGGACTATAAAA[*/ACTTA]GATAAAACACCATTTTGGTCTGAAAGTGTAAATATAGTCACGTTAAAT | |
| | | | | TCTCAAATTTTCATTTTTTTNAAAGTTCCTAAAATGTCAAATAANNNNGCTCCTAAACGTANCTGTTTCCT | |
| | | | | TTGTTCTTAAATATATTAATATTATCATTTAAGTAATGATATTNTGAAATTTAAACTATTTTTTGTTTATNG | |
| | | | | GCTAAGAGCAAACATTATTAATATAAGGAAGAAGATGAAGGGTACAAGGAATACTTGCCCCTNACACA | |
| | | | | ACTAGCTCAATAGTTATGTAAAATGATGAATCCTCTAGCCTAAATATATGCACCCCAAAAATAAACCCTCT | |
| | | | | ATGTAAACTATTACCCTAATCATCAAACCCAGCAAAAATCATTAAACCCTACTCATCTATATAAACTTNGA | |
| | | | | CTAAAATAATTGGCAGATTACACTTTNAGTAATATTTTTTTTAAAAAAAAAANCTNACTTTTATATAATAT | |
| | | | | GACAGTGTNATATACACTTTCAACGACC | |
| SY4257 | SY4257F1 | GGTAGGT | | | 948 |
| | | TCTAGCC | | | |
| | | CGATAGGA | | | |
| SY4257 | SY4257R1 | CGTGACT | | | 949 |
| | | ATATTTAC | | | |
| | | ACTTTCA | | | |
| | | GACCA | | | |
| SY4257 | SY4257A1FM | ATGGTGT | I | | 950 |
| | | TTTATCTA | | | |
| | | AGTTT | | | |
| SY4257 | SY4257A2TT | AAATGGT | D | | 951 |
| | | GTTTTATC | | | |
| | | TTTTAT | | | |
| SY4281 | | | | TAAAAGGCTATTTATCCATATTCAATATCTCAAATGGGTACCTAGCATGTGTATATGCATCATTTAATGGA | 577 |
| | | | | GTACTGACACAGTAAATATATATAGAATAAAGTACATGCCGTGCATTCCAGCAAAATGGGACTACAATA | |
| | | | | AGGATTTTATTGAACTCTCAAAATGCATGCATGAAATCTATTAAGTACACAAAGATAATATTAGTGGACG | |
| | | | | GTTTCAACCACTTCTTTCAGAAAAACCAAGTTTCTATGTTATTTTTATAGCGTGTTTGGGATGTGATTTTCC | |
| | | | | ACGTTTTAGATATGATTTTCAGAAACTAATACTTATAGCTTTCACATCCCAAACGTTATTTCTTAAACGAG | |
| | | | | TTTCCATAAACACGCTATTAGTAAATCAAAACCACCCATGAAAGCCAGAATTATATTGGAAAACAAAATT | |
| | | | | GATCCAATTAGAAGCAAAGATATTATATAATATACATATAACAATTAATTCAAAAGAGCTGGAATAGAA | |
| | | | | AAACAACA[C/G]AGACACTTATCATGCACACACTTTACTCGCTATTCTTACCTTAATAACTTGAAGGCTCC | |
| | | | | ATGAAAAGCTATATGAACTTTTNTAAGAGTTTTTTTCTGAATTGGATTGAGTATAAAAATGTGAGTTTGC | |
| | | | | TAGCAAAATGGTNGAAGAGGGAATTGCAACAGAGCTGAAAACTTGTCAAGACACTANTACTTGGTGTG | |
| | | | | AGAATGAGAAATTAAGGTGACCCTCTATTTATATNTGTGCACACTAATTAAGTACACTTCTTCCATGCTA | |
| | | | | GCAACCTGGTGAGAAAGGATAAGTCATAAGCGGCAACTGTGTAATACCACTTGGCGAAAAGTGACCCT | |
| | | | | CTCTTTGCACTTTTCATGTACACTCTTNGAGTATAAAAGTCATAAGAGGCAACTTAACTTGGTNCTACTTG | |
| | | | | GTGAAAGTGGACCCTCTATTTATACGGACACTCTGGATTATAAAAGTCATATGCGGCAACTTTAGTAATA | |
| | | | | GCTTCCAATCATTATTATTTGAGA | |
| SY4281 | SY4281F1 | AAACCAC | | | 952 |
| | | CCATGAA | | | |
| | | AGCCAGAA | | | |
| SY4281 | SY4281R1 | AAGAATA | | | 953 |
| | | GCGAGTA | | | |
| | | AAGTGTG | | | |
| | | TGC | | | |
| SY4281 | SY4281A1FM | TGATAAG | G | | 954 |
| | | TGTCTCT | | | |
| | | GTTGTT | | | |
| SY4281 | SY4281A2TT | TGATAAG | C | | 955 |
| | | TGTCTGT | | | |
| | | GTTGTT | | | |
| SY4284 | | | | AAAGTACTAGCCATCGAGACTCTAGTGCGCACCACCAGAGAAAAANGTGATTGCCTCATTCCATCAAAC | 578 |
| | | | | TTTACTACTACAAATTCAAGACATACGATATCCAATATTCCTATAATGTACTAGCCATATAGACTCTAGTG | |
| | | | | TGCACCAGTAGAAAGGTTCTTGTCCTTATTCCATCAAACTACTTCTTGTCACAAGCCAATATATACAACAC | |
| | | | | AATAAGATTTAATTTTGTTTTGTAAGATATTTTAAAATTATAAAGAACTTGTAGTTCAAAATATCTTANTTT | |
| | | | | GATACCTATAATTGTAATCTTTTTACTCTTTTGATCATTGTCATGAAATCTCTACTAATAACACCCTTTAAA | |
| | | | | AGTAGCATGACATAACTCATTTAATCCGTGTTCATCGAGTAAATATTTTGAAGTCTTGACACATTTCTAAA | |
| | | | | AGGAAGAGCCAAACTACCTGCGAAAAAGAAGATTCAATCAATACATTTAGATAAGCTTTCTGAGTAGAT | |
| | | | | TTATT[A/G]TCATNATTTTAAAAATCAGACCCTGTCAGTTCTCGTAAATTTATGTTTTTTTTTAAATACTTG | |
| | | | | GTGCGTAGTCCTCTTCACTTCATTTGATTGCTTATACCTATCACAATCGCTTAGAACATAGTCATAGCTCTC | |
| | | | | TATATGGCTAAACACATGCATTCACAGTACATTTGATGATTTCGAACGTTGCCACCATGTATGTAGACTG | |
| | | | | CAAGTGTCCTNATTACATATTATATTACATATGTGATATTTAGTAATATTTTTTTAGTTTAATACTTAATAA | |
| | | | | AAAATTTGTTAAATATCTTTGATAANATTNAAAAAAATATCTTTAAATTATAAATAAACTTTATAAATATG | |
| | | | | TTTTTATGATATTTTGATANTTTTTAATGTTATAAAAAAANTTTAATAATATTTTTATTAAGTCTCAGACNA | |
| | | | | AAAAAATATTATTAAAGGNCACATATATAATATAANAGTGTGTTACTTTTGTTTCGCTGGGGTTGACATA | |
| | | | | AAATTAATTT | |
| SY4284 | SY4284F1 | AAGAGCC | | | 956 |
| | | AAACTAC | | | |
| | | CTGCGAAA | | | |
| SY4284 | SY4284R1 | ACGAGAA | | | 957 |
| | | CTGACAG | | | |
| | | GGTCTGAT | | | |
| SY4284 | SY4284A1FM | TTCTGAG | A | | 958 |
| | | TAGATTT | | | |
| | | ATTATCA | | | |
| SY4284 | SY4284A2TT | TTCTGAG | G | | 959 |
| | | TAGATTT | | | |
| | | ATTGTCG | | | |
| SY4261 | | | | CCTTATTCTATTTTTTAAAAATACTTATCTACATAAGGTGTTTGACAACAANAAAATTGATCGAGCTCATT | 579 |
| | | | | TTTTTCCTTTCTAGTTTTATGAATTTCAGCACTTAATTTTGTGATTTTATTCTAGAGGTTCCATCTCGTCTCA | |
| | | | | TTGATTAGCTAGGAATATAATTTTTTTTATTATAAGCCAAANATATATTATTAAAATCAAACCACCCTCAG | |
| | | | | CACAAGTTGTGCAAAGATAATGATAGTAAAGTTAGTCCTGAAACCTCATATTAAATAATAATAATAATGG | |
| | | | | CATCCAAACTTTTATTNAGGCACTTGTAAAAAATTTAAAGATGTTTGTTTTGTCAAATTTTTGTTCAGAGA | |
| | | | | TTAAAAAGAATCTTGATCAGTCAAATTTTTATTCAATGATTAAGAANTAAATTTTAAAAAAATCAAGAAC | |
| | | | | AAAAACTTTTATAATCCATATGAAATTGATGATAAACTAGGTGTTTGCTTCGTTGTGAAAATTCTGCTATC | |
| | | | | ATA[A/G]CATTCATCGAAAGAAAAAGGAAGGTGGTGCACTTTGGTGGTTTCATCAAGTGAGGTGCTGTC | |
| | | | | TATTCCAAACAAAACTTGTTTGTGCATCATATGTGTGAGAGACTTACTAAATGCAGGTCAGGCATGGCTT | |
| | | | | GAAAAAAGGGAGACAGGCTAGGTCTGTTTCACACAAAAGAAGCGTGGCCAATTATTAAAAAGAACTTG | |
| | | | | ATTAGATATGAAGGGTGTGTTAATAAATATCTCTCAGCAGTATGATGCTCTGTCTTGTTAATTTTGTTTTT | |
| | | | | CTTTTTTAAAGAAAGAGAAAAGGCTTTAGTCTATACGATAAATAAAAAAGAGAAGAAGGNCTTTCTTTG | |
| | | | | TATCACTTTGAAATCATATAATGACTATCATTTTAATTTTTCTCATCAAGAGAAAACTAAATGCTCAAAAA | |
| | | | | TTTGTTTTTATTTTATTAAAAAGGGTAAATAAATACTATTAATACACATAATGATCCAATCTTACAATTTTG | |
| | | | | ATGAATAATTAACAAAG | |
| SY4261 | SY4261F1 | AGGTGTT | | | 960 |
| | | TGCTTCG | | | |
| | | TTGTGAAA | | | |
| SY4261 | SY4261R1 | CCAAAGT | | | 961 |
| | | GCACCAC | | | |
| | | CTTCCTT | | | |
| SY4261 | SY4261A1FM | CTTTCGAT | G | | 962 |
| | | GAATGCT | | | |
| | | ATGA | | | |
| SY4261 | SY4261A2TT | CTTTCGAT | A | | 963 |
| | | GAATGTT | | | |
| | | ATGATA | | | |
| SY4305 | | | | TTAAGAGTAATGATAAAAAAANTTATTGAAAATTAAGAGTATCTCTTATGTTTAATCGATGTGGTCTCAA | 580 |
| | | | | TCATTAGACGATATTTAATAAGATAAGATATTTTCCAACTACATCATNNNGTGCATCCTCCATATAATTAC | |
| | | | | TAAATCCAAATCTCTTGTTATTCAAACACTATAACGACATCAAAGATGTACTCNAGCTATGTATTAGTTTC | |
| | | | | CTTTTTCTTTTCCCCTTTCAAAAAGAAAATAGTGCATAAGGGCCACTAATTTCTTTTTTAAANNTTGCTATG | |
| | | | | TGCCATACTTGGTAGGTGCAAACAAACAAAATAGAGTAGTTACATAGTTAACATGGAGGAAATTAAACT | |
| | | | | ACATATGGGGTAGGTTCTAGCCCGATAGGACTATAAAANNNNNGATAAAACACCATTTTGGTCTGAAA | |
| | | | | GTGTAAATATAGTCACGTTAAATTCTCAAATTTTCATTTTTTTNAAAGTTCCTAAAATGTCAAATAANNNN | |
| | | | | GCTCCTAAACGTA[A/G]CTGTTTCCTTTGTTCTTAAATATATTAATATTATCATTTAAGTAATGATATTNTG | |
| | | | | AAATTTAAACTATTTTTTGTTTATNGGCTAAGAGCAAACATTATTAATATAAGGAAGAAGATGAAGGGTA | |
| | | | | CAAGGAATACTTGCCCCTNACACAACTAGCTCAATAGTTATGTAAAATGATGAATCCTCTAGCCTAAATA | |
| | | | | TATGCACCCCAAAAATAAACCCTCTATGTAAACTATTACCCTAATCATCAAACCCAGCAAAAATCATTAAA | |
| | | | | CCCTACTCATCTATATAAACTTNGACTAAAATAATTGGCAGATTACACTTTNAGTAATATTTTTTTTAAAA | |
| | | | | AAAAAANCTNACTTTTATATAATATGACAGTGTNATATACACTTTCAACGACCTAAATGATGTGCTATAT | |
| | | | | CCCANAANGTGATCAAAATCTCAAAATGCACGAATATTCACTTCCTTCATAAACAAGCCTACTCTAAGTA | |
| | | | | AATAAAAGGACCCATAATACAAC | |
| SY4305 | SY4305F1 | TTGGTCT | | | 964 |
| | | GAAAGTG | | | |
| | | TAAATAT | | | |
| | | AGTCACG | | | |
| SY4305 | SY4305R1 | GCAAGTA | | | 965 |
| | | TTCCTTGT | | | |
| | | ACCCTTC | | | |
| | | ATC | | | |
| SY4305 | SY4305A1FM | CTCCTAA | A | | 966 |
| | | ACGTAAC | | | |
| | | TGT | | | |
| SY4305 | SY4305A2TT | CTCCTAA | G | | 967 |
| | | ACGTAGC | | | |
| | | TG | | | |
| SY4276 | | | | CAAAACTATACTAATAATTGCAATCCANTTGATAATTATATTNTTACCANTGTTTCTTTTTNGCTAAAAGC | 581 |
| | | | | AAGATACCACCACAATTAAAANGACCCTGAGACTAATTTTTTAAGACGTAGAAATTATTAAAATANTTTT | |
| | | | | TTTTCTTTCTTNNTTAGTAAAGTATTTTCTATGTGTATGAATAAAGAATCAAATTCTCGTCAATATACTCAA | |
| | | | | GAAATCCAATTATCATAGCAGTAAATTGTTATGCTATTTCTACTATATTGTTATTATGTTCCTTCTTTAGGA | |
| | | | | GAGAAATGACTCACATAGCATAGGATATAGATTTGGTNTAGTAATTAAGGAAATGGAGTATTGATNAAA | |
| | | | | TAAAAAAAACGTGATTCTTTACCNTTGAGATTAAGAGTAATGATAAAAAAANTTATTGAAAATTAAGAG | |
| | | | | TATCTCTTATGTTTAATCGATGTGGTCTCAATCATTAGACGATATTTAATAAGATAAGATATTTTCCAACT | |
| | | | | ACATCAT[*/CAT]GTGCATCCTCCATATAATTACTAAATCCAAATCTCTTGTTATTCAAACACTATAACGAC | |
| | | | | ATCAAAGATGTACTCNAGCTATGTATTAGTTTCCTTTTTCTTTTCCCCTTTCAAAAAGAAAATAGTGCATA | |
| | | | | AGGGCCACTAATTTCTTTTTTAAANNTTGCTATGTGCCATACTTGGTAGGTGCAAACAAACAAAATAGAG | |
| | | | | TAGTTACATAGTTAACATGGAGGAAATTAAACTACATATGGGGTAGGTTCTAGCCCGATAGGACTATAA | |
| | | | | AANNNNNGATAAAACACCATTTTGGTCTGAAAGTGTAAATATAGTCACGTTAAATTCTCAAATTTTCATT | |
| | | | | TTTTTNAAAGTTCCTAAAATGTCAAATAANNNNGCTCCTAAACGTANCTGTTTCCTTTGTTCTTAAATATA | |
| | | | | TTAATATTATCATTTAAGTAATGATATTNTGAAATTTAAACTATTTTTTGTTTATNGGCTAAGAGCAAACA | |
| | | | | TTATTAATATAAGGAAGAAGA | |
| SY4276 | SY4276F1 | CTCTTATG | | | 968 |
| | | TTTAATC | | | |
| | | GATGTGG | | | |
| | | TCTCAATC | | | |
| SY4276 | SY4276R1 | AGTGGCC | | | 969 |
| | | CTTATGC | | | |
| | | ACTATTTTC | | | |
| SY4276 | SY4276A1FM | CCAACTA | I | | 970 |
| | | CATCATC | | | |
| | | ATGT | | | |
| SY4276 | SY4276A2TT | TTCCAACT | D | | 971 |
| | | ACATCAT | | | |
| | | GTG | | | |
| SY4299 | | | | TATTAAATATAAAGTGGTNTGAAGTGACGTAAGTGCAAGTATATYGTGTGAGTGGCATTTTCAATTAAA | 582 |
| | | | | AAGACAGTGGTACGTCCTAGATTTAATAAAAATATNTGTCAGTATTNAAAAAAAATCTCGTGCTTTTTAT | |
| | | | | TTGATTGCTGAAGAAAAAAATTANCAATTATGTAGTATAAGTTANAAAAAAANTCATATTCTCCCTCAAC | |
| | | | | AAGAAATTATAGTTAATAAGAGTTTCAAAAAAGTTACTATAATGATCAACCAGCTTATTTTATGTGATAA | |
| | | | | TTTATTATTAAATTATATAAAATTATTTTATATTATCAGTGTATAATTTATTTTNNAAAAAAAAATACATAA | |
| | | | | ATAGTTTATTGTGTCAGATAAATTCTGATTGGAAGCTATTAAAGTTGCCCTTTAGAACTTTTATATATTTTC | |
| | | | | CAGTGTGCACATATANAAAAGAGGGTCACCTTTCACCTAGTGGTATGAAGTGGAAGTGTCTTGAACAAT | |
| | | | | AGTCTTCA[*/GCTCT]GAGGATGCTGCAATTCTCTTCCACCATTTNCCAAACAAATTAAAATGTTTCTGAA | |
| | | | | TCCAATTTGGAAACCAAAAAGTTCNTAGCTTTTCATAGAGCTTTCAAGTAATTAGCCCCGTGAAATATTTT | |
| | | | | TCTTTTTACGCAAGATGACACCACGGGCCTTCTAACTGAAACAAGCAATAATAATAACAGGCCAAGGAA | |
| | | | | AAACTCAGCAGCATTCTGTTAGAAGGAAAACACTTATCTCTATTAGCATATTTNTCTCCATTAATCTCTTA | |
| | | | | CTTCAGTCCTCTATCAGGTAAGAGTAGGACGTAAAATGTGTGATAGATGTTTGTGTTATTGTTTTCCTTTT | |
| | | | | CCAGTTCTGTTGAATTAAATGCTGTATTATATGATATCCTTGCTGCTAATATGCTTAACTGAATGAGTTTT | |
| | | | | TTACGTATGCTCTACGTGTTTTCCAATTCTTGCTTTTTCTAAAAGAATTTCTTGAACCTCCCCTCATATTTCC | |
| | | | | TTTGTGAACTTACCAGAT | |
| SY4299 | SY4299F1 | AGTGGTA | | | 972 |
| | | TGAAGTG | | | |
| | | GAAGTGT | | | |
| | | CTTG | | | |
| SY4299 | SY4299R1 | GGCCCGT | | | 973 |
| | | GGTGTCA | | | |
| | | TCTTG | | | |
| SY4299 | SY4299A1FM | TCAGCTC | I | | 974 |
| | | TGAGGAT | | | |
| | | GC | | | |
| SY4299 | SY4299A2TT | AACAATA | D | | 975 |
| | | GTCTTCA | | | |
| | | GAGGATGC | | | |
| SY4291 | | | | ATCAACCAGCTTATTTTATGTGATAATTTATTATTAAATTATATAAAATTATTTTATATTATCAGTGTATAA | 583 |
| | | | | TTTATTTTNNAAAAAAAAATACATAAATAGTTTATTGTGTCAGATAAATTCTGATTGGAAGCTATTAAAG | |
| | | | | TTGCCCTTTAGAACTTTTATATATTTTCCAGTGTGCACATATANAAAAGAGGGTCACCTTTCACCTAGTGG | |
| | | | | TATGAAGTGGAAGTGTCTTGAACAATAGTCTTCANNNNNGAGGATGCTGCAATTCTCTTCCACCATTTN | |
| | | | | CCAAACAAATRTTAAAATGTTTCTGAATICCAATTTGGAAACCAAAAAGTTCNTAGCTTTTCATAGAGCTTTCA | |
| | | | | AGTAATTAGCCCCGTGAAATATTTTTCTTTTTACGCAAGATGACACCACGGGCCTTCTAACTGAAACAAG | |
| | | | | CAATAATAATAACAGGCCAAGGAAAAACTCAGCAGCATTCTGTTAGAAGGAAAACACTTATCTCTATTA | |
| | | | | GCATATTT[C/G]TCTCCATTAATCTCTTACTTCAGTCCTCTATCAGGTAAGAGTAGGACGTAAAATGTGTG | |
| | | | | ATAGATGTTTGTGTTATTGTTTTCCTTTTCCAGTTCTGTTGAATTAAATGCTGTATTATATGATATCCTTGC | |
| | | | | TGCTAATATGCTTAACTGAATGAGTTTTTTACGTATGCTCTACGTGTTTTCCAATTCTTGCTTTTTCTAAAA | |
| | | | | GAATTTCTTGAACCTCCCCTCATATTTCCTTTGTGAACTTACCAGATTTCATGCATTTTGAGAGTCATAGA | |
| | | | | ATTTCTTATTATAGTTAGGCCGATTCTGCTAGAATCTAGCTACTGCATGCATGTACTTTGTTCAATATGTG | |
| | | | | TCAGTGATCCATAAGTAATGCATAATACACATGTTAGTCCATATGGGATCTGGAATTTGATCAATAATAT | |
| | | | | TTGCAGATGATTTCATAACAGACTGATATACGTGCAACGTAATTGTTAGAATAGATTTCGATACCACCTT | |
| | | | | AATTTTGAATTTAGG | |
| SY4291 | SY4291F1 | ACTCAGC | | | 976 |
| | | AGCATTC | | | |
| | | TGTTAGA | | | |
| | | AGGA | | | |
| SY4291 | SY4291R1 | ACTCTTAC | | | 977 |
| | | CTGATAG | | | |
| | | AGGACTG | | | |
| | | AAG | | | |
| SY4291 | SY4291A1FM | ATTAGCA | C | | 978 |
| | | TATTTCTC | | | |
| | | TCCATT | | | |
| SY4291 | SY4291A2TT | TATTAGC | G | | 979 |
| | | ATATTTGT | | | |
| | | CTCCAT | | | |
| SY4303 | | | | AAATAAAATAAATAAAATGACTTATCAAATTTTAAGTTTTCTATAAGTTTTTAGAATATTTTATTTTTATTG | 584 |
| | | | | ATTAANTATTTTACTAATTTTATTNCACTTTTTTGAAANTGAGTAAAAAACAAAAATAAAAAATNTATATA | |
| | | | | NNATTTAATTTTAAACTGGATAAATAATTTGATGAATGAGTCCTTTTTTTTAGCCAATAAGTGCATCTTTT | |
| | | | | ATTGATTTGATTTACATTATATTTTATTTAATCTGTCACNNCATGTAACTGATGGAGATGGCATCCCCATC | |
| | | | | TTTGGTTCTAGTCATCACTTATGGATTGACCACAACGACTCACTCTTCAATTGCACTGATGGCCTAATTGG | |
| | | | | TGCTGTTATGGGCTCCACTGCCATTACCATTTCCAACAACTGCTTCATCCCCTAACTAGGTCGATCTACTA | |
| | | | | ATTAATAGTCCTTTTGGTTAAAATATTTGAAGGAATTCTCTCATCATGTGTTTACTTTGTTTTAACCAAGTA | |
| | | | | NTACG[A/G]CCATAGAGAGNTAGTGTTGAGTTTATTGACTTCAAAATTATTCAGGTTATGCTACTGGCTC | |
| | | | | AACGTGACTCTTATGTCCACGATCAGCATATGCAAGGAATCAATGCATACAACCATTTCGGGGAGAATCT | |
| | | | | TAACCAAAGAATGCCCAGGTAATTAACTAACATCTTTTANGTAGTAGTAGTATCTCTAGATATTTTACTTT | |
| | | | | TTTTTTTNNAATTGTATATGTCATTCCATCTAACATTTTGTTCAATTCTATGATAATAATTTTTAATTACTTAT | |
| | | | | TATTTTTAAAAATAGNCTTAGTTACTATTTTGNTCTTNTAATTTAATTTTNAAGTTCAATTTGATTCTCTTA | |
| | | | | ATATTAAAAAGTTNAATTTNNTCCTCTNANNNNNNTTTTTTTAAATGACTTAATTAGNTCCTTTTACTTTT | |
| | | | | AGAAGTTTCAATTAAGTCATTTATTTTTTAAAATAGGTTCAATTTGATCTTATTTTTCTTTCATGTGCTNCA | |
| | | | | ANTTTTTTTA | |
| SY4303 | SY4303F1 | GGCTCCA | | | 980 |
| | | CTGCCAT | | | |
| | | TACCATT | | | |
| SY4303 | SY4303R1 | TGAGCCA | | | 981 |
| | | GTAGCAT | | | |
| | | AACCTGAA | | | |
| SY4303 | SY4303A1FM | TCTCTATG | G | | 982 |
| | | GCCGTA | | | |
| SY4303 | SY4303A2TT | CTCTCTAT | A | | 883 |
| | | GGTCGTA | | | |
| SY4273 | | | | CTCCATCAGTTACATGNNGTGACAGATTAAATAAAATATAATGTAAATCAAATCAATAAAAGATGCACTT | 585 |
| | | | | ATTGGCTAAAAAAAAGGACTCATTCATCAAATTATTTATCCAGTTTAAAATTAAATNNTATATANATTTTT | |
| | | | | TATTTTTGTTTTTTACTCANTTTCAAAAAAGTGNAATAAAATTAGTAAAATANTTAATCAATAAAAATAAA | |
| | | | | ATATTCTAAAAACTTATAGAAAACTTAAAATTTGATAAGTCATTTTATTTATTTTATTTTATTATTATGCAA | |
| | | | | ATGGTTGGGATTTTCACTTTCATTTTATTTGCATCTAATATTGTACTTAATAATGCATTTATCAAAATTAAG | |
| | | | | TGAAAAAATAAAATTATTTTAATAAAATTGTNTCCTGATAAATATAAATTCTCTTGAAATATTTATTTTCTT | |
| | | | | TTGGGACGAAGGGTTTTTTTTTTTTGCATTTTAAGATCTAGTTTAATAGAATCTATTATTGTAGTACTATTA | |
| | | | | TTGA[A/G]ATTTTGTATTATTGTAGTCCTATTATGCTATAATCCACCACATGTAGTTTAATTTGCTCAACTC | |
| | | | | TGTCACTACTCTATTTTGTGAGTTTTGCACGTACCAAGTGGGGGTACATAGCAATTTAAAAAGAGATACA | |
| | | | | CAATTTTGGATCACAACTTAGATGTAGATGAATTTCAATCCTTAGATGAAAATCAGGTCATTCATGTTTTT | |
| | | | | CTGATTTCACCAATTACGTCTTCCCCTTACTACATTTCCAAATCTCTGATACTAATAACCCCGGACCCAATA | |
| | | | | TATATAAAGGTGTAAGTCTGCTTTCTCAAACCTCCACCTTTTTCACTCATCAAATAAATCAGAAATTAATA | |
| | | | | TCAAATAAATTGTATCTTCAAAATTTAAATGTTTTCTTAACATGCATATGGTATATTATTTTATGTTTTTAA | |
| | | | | TATAAACTGAATGATTTAACTTTAATTTTTTATTTCTTTTNATTTATCATTTTTAACATTTTTAATTCTAAATT | |
| | | | | GAATTTG | |
| SY4273 | SY4273F1 | TTTCTTTT | | | 984 |
| | | GGGACGA | | | |
| | | AGGGTTT | | | |
| SY4273 | SY4273R1 | AGAGTAG | | | 985 |
| | | TGACAGA | | | |
| | | GTTGAGC | | | |
| | | AA | | | |
| SY4273 | SY4273A1FM | CTACAAT | G | | 986 |
| | | AATACAA | | | |
| | | AATCTCA | | | |
| | | ATA | | | |
| SY4273 | SY4273A2TT | CTACAAT | A | | 987 |
| | | AATACAA | | | |
| | | AATTTCA | | | |
| | | ATA | | | |
| SY4256 | | | | AAACCAAGTTTCTATGTTATTTTTATAGCGTGTTTGGGATGTGATTTTCCACGTTTTAGATATGATTTTCA | 586 |
| | | | | GAAACTAATACTTATAGCTTTCACATCCCAAACGTTATTTCTTAAACGAGTTTCCATAAACACGCTATTAG | |
| | | | | TAAATCAAAACCACCCATGAAAGCCAGAATTATATTGGAAAACAAAATTGATCCAATTAGAAGCAAAGA | |
| | | | | TATTATATAATATACATATAACAATTAATTCAAAAGAGCTGGAATAGAAAAACAACANAGACACTTATCA | |
| | | | | TGCACACACTTTACTCGCTATTCTTACCTTAATAACTTGAAGGCTCCATGAAAAGCTATATGAACTTTTNT | |
| | | | | AAGAGTTTTTTTCTGAATTGGATTGAGTATAAAAATGTGAGTTTGCTAGCAAAATGGTNGAAGAGGGAA | |
| | | | | TTGCAACAGAGCTGAAAACTTGTCAAGACACTANTACTTGGTGTGAGAATGAGAAATTAAGGTGACCCT | |
| | | | | CTATTTATAT[A/T]TGTGCACACTAATTAAGTACACTTCTTCCATGCTAGCAACCTGGTGAGAAAGGATA | |
| | | | | AGTCATAAGCGGCAACTGTGTAATACCACTTGGCGAAAAGTGACCCTCTCTTTGCACTTTTCATGTACAC | |
| | | | | TCTTNGAGTATAAAAGTCATAAGAGGCAACTTAACTTGGTNCTACTTGGTGAAAGTGGACCCTCTATTTA | |
| | | | | TACGGACACTCTGGATTATAAAAGTCATATGCGGCAACTTTAGTAATAGCTTCCAATCATTATTATTTGAG | |
| | | | | ATATTTTTNAACACATTTTTCTTAATATATTTTTTATTAATAAAATTATAAAATTATGAGTGATATTAATTTT | |
| | | | | TTAAATAAGAAGTGAAATTTATAAATTTTAATTAATAATAAAGAATATATTTATAAGATTNNATATNNGT | |
| | | | | TTGTAAGAAGCTGTTGAAACATGTATTCNTATCAAATTAAAGGCATGAGGATTTTGGATAGAGACAAAT | |
| | | | | GTAGGACATACCTATAATTAA | |
| SY4256 | SY4256F1 | TGCAACA | | | 988 |
| | | GAGCTGA | | | |
| | | AAACTTG | | | |
| | | TC | | | |
| SY4256 | SY4256R1 | ACACAGT | | | 989 |
| | | TGCCGCT | | | |
| | | TATGAC | | | |
| SY4256 | SY4256A1FM | CCCTCTAT | A | | 990 |
| | | TTATATAT | | | |
| | | GTGCA | | | |
| SY4256 | SY4256A2TT | CCTCTATT | T | | 991 |
| | | TATATTTG | | | |
| | | TGCAC | | | |
| SY4289 | | | | TAGTAAAGTATTTTCTATGTGTATGAATAAAGAATCAAATTCTCGTCAATATACTCAAGAAATCCAATTAT | 587 |
| | | | | CATAGCAGTAAATTGTTATGCTATTTCTACTATATTGTTATTATGTTCCTTCTTTAGGAGAGAAATGACTC | |
| | | | | ACATAGCATAGGATATAGATTTGGTNTAGTAATTAAGGAAATGGAGTATTGATNAAATAAAAAAAACGT | |
| | | | | GATTCTTTACCNTTGAGATTAAGAGTAATGATAAAAAAANTTATTGAAAATTAAGAGTATCTCTTATGTT | |
| | | | | TAATCGATGTGGTCTCAATCATTAGACGATATTTAATAAGATAAGATATTTTCCAACTACATCATNNNGT | |
| | | | | GCATCCTCCATATAATTACTAAATCCAAATCTCTTGTTATTCAAACACTATAACGACATCAAAGATGTACT | |
| | | | | CNAGCTATGTATTAGTTTCCTTTTTCTTTTCCCCTTTCAAAAAGAAAATAGTGCATAAGGGCCACTAATTT | |
| | | | | CTTTTTTAAA[*/AA]TTGCTATGTGCCATACTTGGTAGGTGCAAACAAACAAAATAGAGTAGTTACATAG | |
| | | | | TTAACATGGAGGAAATTAAACTACATATGGGGTAGGTTCTAGCCCGATAGGACTATAAAANNNNNGAT | |
| | | | | AAAACACCATTTTGGTCTGAAAGTGTAAATATAGTCACGTTAAATTCTCAAATTTTCATTTTTTTNAAAGT | |
| | | | | TCCTAAAATGTCAAATAANNNNGCTCCTAAACGTANCTGTTTCCTTTGTTCTTAAATATATTAATATTATC | |
| | | | | ATTTAAGTAATGATATTNTGAAATTTAAACTATTTTTTGTTTATNGGCTAAGAGCAAACATTATTAATATA | |
| | | | | AGGAAGAAGATGAAGGGTACAAGGAATACTTGCCCCTNACACAACTAGCTCAATAGTTATGTAAAATG | |
| | | | | ATGAATCCTCTAGCCTAAATATATGCACCCCAAAAATAAACCCTCTATGTAAACTATTACCCTAATCATCA | |
| | | | | AACCCAGCAAAAATCATTAAACCCT | |
| SY4289 | SY4289F1 | AGTGCAT | | | 992 |
| | | AAGGGCC | | | |
| | | ACTAATTTC | | | |
| SY4289 | SY4289R1 | CTATTTTG | | | 993 |
| | | TTTGTTTG | | | |
| | | CACCTAC | | | |
| | | CA | | | |
| SY4289 | SY4289A1FM | TGGCACA | I | | 994 |
| | | TAGCAAT | | | |
| | | TTTTAA | | | |
| SY4289 | SY4289A2TT | TATGGCA | D | | 995 |
| | | CATAGCA | | | |
| | | ATTTAAA | | | |
| SY4285 | | | | TACCACCACAATTAAAANGACCCTGAGACTAATTTTTTAAGACGTAGAAATTATTAAAATANTTTTTTTTC | 588 |
| | | | | TTTCTTNNTTAGTAAAGTATTTTTCTATGTGTATGAATAAAGAATCAAATTCTCGTCAATATACTCAAGAAA | |
| | | | | TCCAATTATCATAGCAGTAAATTGTTATGCTATTTCTACTATATTGTTATTATGTTCCTTCTTTAGGAGAGA | |
| | | | | AATGACTCACATAGCATAGGATATAGATTTGGTNTAGTAATTAAGGAAATGGAGTATTGATNAAATAAA | |
| | | | | AAAAACGTGATTCTTTACCNTTGAGATTAAGAGTAATGATAAAAAAANTTATTGAAAATTAAGAGTATCT | |
| | | | | CTTATGTTTAATCGATGTGGTCTCAATCATTAGACGATATTTAATAAGATAAGATATTTTCCAACTACATC | |
| | | | | ATNNNGTGCATCCTCCATATAATTACTAAATCCAAATCTCTTGTTATTCAAACACTATAACGACATCAAAG | |
| | | | | ATGTACTC[A/G]AGCTATGTATTAGTTTCCTTTTTCTTTTCCCCTTTCAAAAAGAAAATAGTGCATAAGGG | |
| | | | | CCACTAATTTCTTTTTTAAANNTTGCTATGTGCCATACTTGGTAGGTGCAAACAAACAAAATAGAGTAGT | |
| | | | | TACATAGTTAACATGGAGGAAATTAAACTACATATGGGGTAGGTTCTAGCCCGATAGGACTATAAAANN | |
| | | | | NNNGATAAAACACCATTTTGGTCTGAAAGTGTAAATATAGTCACGTTAAATTCTCAAATTTTCATTTTTTT | |
| | | | | NAAAGTTCCTAAAATGTCAAATAANNNNGCTCCTAAACGTANCTGTTTCCTTTGTTCTTAAATATATTAA | |
| | | | | TATTATCATTTAAGTAATGATATTNTGAAATTTAAACTATTTTTTGTTTATNGGCTAAGAGCAAACATTAT | |
| | | | | TAATATAAGGAAGAAGATGAAGGGTACAAGGAATACTTGCCCCTNACACAACTAGCTCAATAGTTATGT | |
| | | | | AAAATGATGAATCCTCTAGCCTA | |
| SY4285 | SY4285F1 | AAATCCA | | | 996 |
| | | AATCTCTT | | | |
| | | GTTATTC | | | |
| | | AAACACTA | | | |
| SY4285 | SY4285R1 | CACCTAC | | | 997 |
| | | CAAGTAT | | | |
| | | GGCACAT | | | |
| | | AGC | | | |
| SY4285 | SY4285A1FM | TCAAAGA | A | | 998 |
| | | TGTACTC | | | |
| | | AAGCT | | | |
| SY4285 | SY4285A2TT | CAAAGAT | G | | 999 |
| | | GTACTCG | | | |
| | | AGCT | | | |
| SY4306 | | | | TGAAAGGTGACCCTCTTTTNTATATGTGCACACTGGAAAATATATAAAAGTTCTAAAGGGCAACTTTAAT | 589 |
| | | | | AGCTTCCAATCAGAATTTATCTGACACAATAAACTATTTATGTATTTTTTTTTNNAAAATAAATTATACACT | |
| | | | | GATAATATAAAATAATTTTATATAATTTAATAATAAATTATCACATAAAATAAGCTGGTTGATCATTATAG | |
| | | | | TAACTTTTTTGAAACTCTTATTAACTATAATTTCTTGTTGAGGGAGAATATGANTTTTTTTNTAACTTATAC | |
| | | | | TACATAATTGNTAATTTTTTTCTTCAGCAATCAAATAAAAAGCACGAGATTTTTTTTNAATACTGACANAT | |
| | | | | ATTTTTATTAAATCTAGGACGTACCACTGTCTTTTTAATTGAAAATGCCACTCACACATATACTTGCACTTA | |
| | | | | CGTCACTTCANACCACTTTATATTTAATAAGTAATTTTGAAATAACTACNACATGATACCATGTTGCAATT | |
| | | | | G[A/G]TACTCTCCACAAAACATTAACATAATGATAATTTGGATAGGATGAATTAATATTTTAACATCGAT | |
| | | | | GTGATATTTGTATTTACATTCAATCTTATCTCTCCGTCTTGCTTCCATCAAAAGGTTGAAATATTTTTGAAG | |
| | | | | TATTCACGCAAGGGAAGCCTTTGAGAACCTATTACATTAGTACGTTGTATGGGTATNATTTTTTTTTTATA | |
| | | | | TATAAAAAAAATCCATACAAGAAATGAGTATTTGATATACTAAAATACATAAATTTCGACATAGTACAAA | |
| | | | | ACATATGATTGGAATTTATTTCCACTATTAAATAGTTAATANGATATATTAGACAAGAAAGGAATAT | |
| | | | | TATCCCATTGATAATGATTGTTCTTTTCTTTTCAGTTTGTATAACTAGATCCTGCTATTCAATTAAAAGAAA | |
| | | | | GGATATAGATTCTAAAACATAAATGAAGTAAAATATTTATAAATTACTATGACAATAANCGGAGTATAAA | |
| | | | | ACATGAACAA | |
| SY4306 | SY4306F1 | GCCACTC | | | 1000 |
| | | ACACATA | | | |
| | | TACTTGC | | | |
| | | ACTT | | | |
| SY4306 | SY4306R1 | TGATGGA | | | 1001 |
| | | AGCAAGA | | | |
| | | CGGAGAG | | | |
| | | AT | | | |
| SY4306 | SY4306A1FM | ACCATGT | A | | 1002 |
| | | TGCAATT | | | |
| | | GATA | | | |
| SY4306 | SY4306A2TT | CCATGTT | G | | 1003 |
| | | GCAATTG | | | |
| | | GTA | | | |
| SY4282 | | | | AAAATGTTGCAATAGTAGTGGATAAACCTATTGAAGCACTTGTTATACTCTCTTCAGGAGAAAAGGACTA | 590 |
| | | | | TATGAACAAAAAATGGAAGAGGGTACTGTGGAAATCTTGTGTTTATGCAATCACACTAGTAATGTTGAT | |
| | | | | TGCAATGCTCATTGGTTTGAATATGGCATGGACTGCAATTGCAGCTGCAATAACTTTGGTGGTTCTTGAT | |
| | | | | TTCAAAGATGCAGGGCCAAGCTTAGACAAGGTAAAGCTTATATAACACAACCNCTTGTACAAAACCTCA | |
| | | | | TTTTCTCTCTTTTCCATTTGAAATGCTAGCTATTGTTATTCTTGTGCCAACTGAACTTCGAACAATCTCTTA | |
| | | | | AAGTGATTTTCTTCTTGGAACAGGTCTCATATTCACTTTTGGTATTCTTCTGTGGAATGTTTATCACAGTA | |
| | | | | GAGGGCTTTAAGTCCACTGGAATTCCAGTGCTATGTGGGACTTAATGGAGCCCTATTCTCGAATAGATC | |
| | | | | ATGCTAGTG[A/G]AACAGCTATACTTCCTATAGTTATACTTGTCCTATCAAATTTGGCTTCAAACGTACCA | |
| | | | | ACAGGTAAGTGCATGATCTTCCTGCCAAAATAATTATTTTTCTGGTACAACTTGTTTATTTATATGTTACCC | |
| | | | | ATCTATTTTATGTTCGATTCATGATTAAAAGACNGTCTACTAATTTTTTTTACCTTGCTTAAATGACAATTA | |
| | | | | GTGAATGGTAAATCTTCAAATGGCTTCTGTTATGCATGNCTTATATTGTTTCCNAGAATTAGNTATACGT | |
| | | | | AACATGNAGCATTTTTTTAATTAATTTGAACTTTCATGACTGCTATAAGATATAATGTTAAATTTATGTGT | |
| | | | | TTGACATTAGTCAATTTTAAANTTTTAAACCAAGTTTGATATAAACTATAGTAGCATACAAAAAGAAATA | |
| | | | | TGTTAGGATTATATTTTCCCTAAAATTTTCAATTGTCATGGGCAAAAAAAAGTATGCAATGTTAAGTCATA | |
| | | | | ATACATATATGCAATC | |
| SY4282 | SY4282F1 | GGGACTT | | | 1004 |
| | | AATGGAG | | | |
| | | CCCTATTC | | | |
| | | TC | | | |
| SY4282 | SY4282R1 | TGGCAGG | | | 1005 |
| | | AAGATCA | | | |
| | | TGCACTTA | | | |
| SY4282 | SY4282A1FM | TCATGCT | A | | 1006 |
| | | AGTGAAA | | | |
| | | CAGCT | | | |
| SY4282 | SY4282A2TT | CATGCTA | G | | 1007 |
| | | GTGGAAC | | | |
| | | AGCT | | | |
| SY4268 | | | | GTCTGGGTAGGGTATTGTGCGTAGACATGTACCAGCACCGGCATTTACACGGGTAACAACTTCTGATTCT | 591 |
| | | | | CATTTCTGTATTAGTTTATATCTATACCTGCAAGTCAATAAATCACTAAAAATATTATTGTTAAATTTTTAG | |
| | | | | AACTAAATCGAAAACTCATCCTGAAATCTTCTAAACATAATCTCATGTGATTAATCTAATTAAGTATGTGA | |
| | | | | TTAAGATNTTCATTTCAAACATAAAAAAGTTACATAAATTTCCAACATAGTATAAAACATAATATTTGAAT | |
| | | | | GATCTTTNTTTTTNNGGGTAAAGATTTGAATGATCTATAGTTACTAAGCAAAAGCATATAATTTTTCACCT | |
| | | | | CAAATATAATTATTTATCAATATAATTAATAAACCCTTTAATTTTTTTTTACTGCAAATAAATCCTATNATC | |
| | | | | AATCATGATGAATGTTTCTTTGATAACAACTACGTTTTCTCTTCACTTCAGGATATAAGAAATGGTCGACT | |
| | | | | TCA[A/G]AAACAAAAACGATAAGAAATGGTCAAAATTTTAAAACTTTGTAACTGAAACAGTGTCAGCTTT | |
| | | | | TACATGATATTGATCAACCTTGAGAGGTTTCCACCCAGGCTAATCAAGATTAAATTAAATGCAACCAATA | |
| | | | | TGTGCTGCCAGAATTAATGTGTTCTGAGGTACTTTATTTGATGGGCTATCATAACAGCTTCGCAGGCTTT | |
| | | | | GTTCTCTCATGTGAAGTTTGAAACAGATTACAAGAAACTGCATGCTACATATGGCANAGCTCTAGTCGA | |
| | | | | GGGAGTATATTGGATGAAGGATTTTCCTCACCAAGTTGCCCTCCTGATTCAATCTGATGTAATTTGATTTC | |
| | | | | TGTTTTGGAATAAAATCAGATGAATTACTCTTAAAAAAAATGTAAAACTTCAAGGAAGTAAAATATCTAT | |
| | | | | TTTAATTTGTACATCNNACAAAATAAATTATATTACAACTAAAATTTGTAATAAATAATATTTTTAAACAT | |
| | | | | ATAAATAATATTTTAG | |
| SY4268 | SY4268F1 | AACAACT | | | 1008 |
| | | ACGTTTTC | | | |
| | | TCTTCACT | | | |
| | | TCAG | | | |
| SY4268 | SY4268R1 | CCTGGGT | | | 1009 |
| | | GGAAACC | | | |
| | | TCTCAA | | | |
| SY4268 | SY4268A1FM | AAATGGT | A | | 1010 |
| | | CGACTTC | | | |
| | | AAAA | | | |
| SY4268 | SY4268A2TT | TGGTCGA | G | | 1011 |
| | | CTTCAGAA | | | |
| SY4269 | | | | CTGAATAAATAGATATATGCTCCAATATATATGCATGACGCTCAAAACCGCGCAGGGAGGCAACAAATT | 592 |
| | | | | AACAAACAACAGTAGCTAGTATTTTAACATTATAGAATTTTAAGTCAACAGACATGCACATTANAAATTG | |
| | | | | AATTTTGNAAATTAAATTTTTATTATTAAGATTTAGNTGACTTATATGNAAAGTAAAATATTATATTTTAC | |
| | | | | TANATGAANATTATTTAAATGAATATATTAGAAGTTGTTTTTATTTCAACTTTTAAGAGAGTTTATTTTTGT | |
| | | | | TTCAACTTAATTTATTTATTATAGTTGGTGATAATTTTTACCGTGAAAAAAAATAGTATATGAAGAGAAA | |
| | | | | GTGTGTGAGAAGAAAGATTGTGAAACAACAGTCACTTTGTTGATAGAAAAATGATTTTGTGTAAGAATG | |
| | | | | TTATCATTTTTTGTAACGTATTCGGTTTTATAGGGTGATACACTATTTGGGAAGAGTTACACTCTTNTAAT | |
| | | | | CATTTTTGT[A/G]ATAGTNAAATACTTTTGAAATGATTANGTGAATNTAAGCAAAAAATGTCGCGTTAAA | |
| | | | | TTCGTATGTTTGTTATTATTTTTCTTGTGGTATAATTTTTATTGTGTTTTTATAATCTTTCGTGTGAAGATTG | |
| | | | | ATTATCCAACACATTTTAATTATAGGTATGTCCTACATTTGTCTCTATCCAAAATCCTCATGCCTTTAATTT | |
| | | | | GATANGAATACATGTTTCAACAGCTTCTTACAAACNNATATNNAATCTTATAAATATATTCTTTATTATTA | |
| | | | | ATTAAAATTTATAAATTTCACTTCTTATTTAAAAAATTAATATCACTCATAATTTTATAATTTTATTAATAAA | |
| | | | | AAATATATTAAGAAAAATGTGTTNAAAAATATCTCAAATAATAATGATTGGAAGCTATTACTAAAGTTGC | |
| | | | | CGCATATGACTTTTATAATCCAGAGTGTCCGTATAAATAGAGGGTCCACTTTCACCAAGTAGNACCAAGT | |
| | | | | TAAGTTGCCTCTTA | |
| SY4269 | SY4269F1 | TGTAACG | | | 1012 |
| | | TATTCGG | | | |
| | | TTTTATAG | | | |
| | | GGTGA | | | |
| SY4269 | SY4269R1 | AACAAAC | | | 1013 |
| | | ATACGAA | | | |
| | | TTTAACG | | | |
| | | CGACAT | | | |
| SY4269 | SY4269A1FM | AATCATTT | A | | 1014 |
| | | TTGTAAT | | | |
| | | AGT | | | |
| SY4269 | SY4269A2TT | AATCATTT | G | | 1015 |
| | | TTGTGAT | | | |
| | | AG | | | |
| SY4272 | | | | ACACAAAGATAATATTAGTGGACGGTTTCAACCACTTCTTTCAGAAAAACCAAGTTTCTATGTTATTTTTA | 593 |
| | | | | TAGCGTGTTTGGGATGTGATTTTCCACGTTTTAGATATGATTTTCAGAAACTAATACTTATAGCTTTCACA | |
| | | | | TCCCAAACGTTATTTCTTAAACGAGTTTCCATAAACACGCTATTAGTAAATCAAAACCACCCATGAAAGCC | |
| | | | | AGAATTATATTGGAAAACAAAATTGATCCAATTAGAAGCAAAGATATTATATAATATACATATAACAATT | |
| | | | | AATTCAAAAGAGCTGGAATAGAAAAACAACANAGACACTTATCATGCACACACTTTACTCGCTATTCTTA | |
| | | | | CCTTAATAACTTGAAGGCTCCATGAAAAGCTATATGAACTTTTNTAAGAGTTTTTTTCTGAATTGGATTGA | |
| | | | | GTATAAAAATGTGAGTTTGCTAGCAAAATGGTNGAAGAGGGAATTGCAACAGAGCTGAAAACTTGTCA | |
| | | | | AGACACTA[A/C]TACTTGGTGTGAGAATGAGAAATTAAGGTGACCCTCTATTTATATNTGTGCACACTAA | |
| | | | | TTAAGTACACTTCTTCCATGCTAGCAACCTGGTGAGAAAGGATAAGTCATAAGCGGCAACTGTGTAATA | |
| | | | | CCACTTGGCGAAAAGTGACCCTCTCTTTGCACTTTTCATGTACACTCTTNGAGTATAAAAGTCATAAGAG | |
| | | | | GCAACTTAACTTGGTNCTACTTGGTGAAAGTGGACCCTCTATTTATACGGACACTCTGGATTATAAAAGT | |
| | | | | CATATGCGGCAACTTTAGTAATAGCTTCCAATCATTATTATTTGAGATATTTTTNAACACATTTTTCTTAAT | |
| | | | | ATATTTTTTATTAATAAAATTATAAAATTATGAGTGATATTAATTTTTTAAATAAGAAGTGAAATTTATAA | |
| | | | | ATTTTAATTAATAATAAAGAATATATTTATAAGATTNNATATNNGTTTGTAAGAAGCTGTTGAAACATGT | |
| | | | | ATTCNTATCAAATTAAAGGC | |
| SY4272 | SY4272F1 | AGAGGG | | | 1016 |
| | | AATTGCA | | | |
| | | ACAGAGC | | | |
| | | TGA | | | |
| SY4272 | SY4272R1 | TGCCGCT | | | 1017 |
| | | TATGACT | | | |
| | | TATCCTTTC | | | |
| SY4272 | SY4272A1FM | TTGTCAA | A | | 1018 |
| | | GACACTA | | | |
| | | ATACTT | | | |
| SY4272 | SY4272A2TT | CAAGACA | C | | 1019 |
| | | CTACTACT | | | |
| | | TGGT | | | |
| SY4250 | | | | CAGGTCTGTGTTCAGTATTTGTCTCAAACATCTCTGTTCTATTTTCAATATTCATTGAAGTTAAATCTTTGG | 594 |
| | | | | CTTGTATGACAAATTGAAGGATGTTTACCTTGGTAAACAGAAGTGGAGGTTTAAGGTGAGAGTGGTTTG | |
| | | | | CATTTGTGATATGTGTCAAGTTAGTGATCCCATTATCCACTTGAATTTGTACAGAGATGTTTGCAAAAATA | |
| | | | | TATCACAATGATGCTTTATACAAGGAATTGTGGCATGTCTGTGTCAACCTTTGACACTCTTTTGAGTGAA | |
| | | | | GGAGAGAGGGTTTATTACTTCCCTCAAGGTCATATGGAACACGTACAAGTTGTATGGGCATGTGCTCTT | |
| | | | | AATTTCTGACTTTAATTNCAGTTAGATGCTTGTGCTACTATTATCTTGCTCCATATCATGTTTTGGATACTA | |
| | | | | GCATAATTGTTTTGTTTCCATTTTCCAATTAAGATCTTATTGGTGTTGGCATGGTTCACCTAACAGTGTTTT | |
| | | | | CTCTT[A/G]ACAATTTTATCTATAAAATTTTTATTTTTCTTGATCTGACTTGTATGCTAGCAGGAGGCGTCT | |
| | | | | TTGTTTANGGTGTGTTTGCTGTAAGTTTTAAAATTGCACAAGTTGCGTCTGGTGGCATTTCAGTTTGGAT | |
| | | | | ATGTTAGATATATTGAACTCAGTTACTATTTCTATTTCCCCTTAAGTTTTAAATGTTAAAATAAATAAATAA | |
| | | | | ATTGAGAGATTAAACCAAATTTGGGTGTATTTTAATTATAGATTTCATGCCAGGATTTAGTGATTTTGGA | |
| | | | | TTTCTTCAGTGTCAAGATTTGTTGGTTTATTTAATTTTAATTTATTTATTTTCTTGACTGATTTAATTGCCTT | |
| | | | | TGCTATTTTTGCAGTGTCTATCTCTGAATATCCAAGATCTTCAAAGGCAATGCTATCTCTGAGAAACATTT | |
| | | | | TTCTGAGGAATGTATAAGCTTGATATTTGCTTTCCTTTGATGATTCATATTTGTTCCTTTTTGGGACTTTAC | |
| | | | | TGTTTAAGA | |
| SY4250 | SY4250F1 | ATTGGTG | | | 1020 |
| | | TTGGCAT | | | |
| | | GGTTCAC | | | |
| SY4250 | SY4250R1 | TAAACAA | | | 1021 |
| | | AGACGCC | | | |
| | | TCCTGCTA | | | |
| SY4250 | SY4250A1FM | AACAGTG | A | | 1022 |
| | | TTTTCTCT | | | |
| | | TAACAAT | | | |
| SY4250 | SY4250A2TT | ACAGTGT | G | | 1023 |
| | | TTTCTCTT | | | |
| | | GACAATT | | | |
| SY4307 | | | | AAGGGTACAAGGAATACTTGCCCCTNACACAACTAGCTCAATAGTTATGTAAAATGATGAATCCTCTAGC | 595 |
| | | | | CTAAATATATGCACCCCAAAAATAAACCCTCTATGTAAACTATTACCCTAATCATCAAACCCAGCAAAAAT | |
| | | | | CATTAAACCCTACTCATCTATATAAACTTNGACTAAAATAATTGGCAGATTACACTTTNAGTAATATTTTT | |
| | | | | TTTAAAAAAAAAANCTNACTTTTATATAATATGACAGTGTNATATACACTTTCAACGACCTAAATGATGT | |
| | | | | GCTATATCCCANAANGTGATCAAAATCTCAAAATGCACGAATATTCACTTCCTTCATAAACAAGCCTACT | |
| | | | | CTAAGTAAATAAAAGGACCCATAATACAACCCAGAAATGGAAAACAATTAAGAGCTAGCANACGTAAA | |
| | | | | AAANTTATTCAGTAAAATCAGCATATATATTAATATTTAAAACAATATATTTACAAATACGTTGCATCTCA | |
| | | | | AAGATAACG[A/G]TGAAATCCCATATTCTCTTTATTTCATTTTAATTTATGTGGTCATGCATAGTACGTAA | |
| | | | | ACATATTGTGCAAATAATCATCAAANTAATCATACATAACGTTTAATTTAATAAAACTGCAAAAGGAAAA | |
| | | | | CAGCAAAAACGTTTATCAAACTTTTTTACATCNTAGTCTTACCTTATAAAGAAAATTCNTTCATGGGCTTC | |
| | | | | GATATAACTTGGAATTCCACACCTTGCAGTCCTTGCATTGGATTTACTTCATGAAAAAGCTATAAACGTTT | |
| | | | | TGTAAGTCTTTTTCGGGATTGAGATTTAGAAATATTTTAATCTATTTGGAAAATAAGAGAAGAGAACTGC | |
| | | | | AGCATCCTTAAAGCTGAAAACCTATCACGAAAACTTCATACCACATGCTGAAAGGTGACTTTCTATTATA | |
| | | | | TAAGTGCACCTGGAGGATAAGAAGAAAATGGCAACTTCGGTAATAACTTCCAATTTAGAATTACACGAA | |
| | | | | TGAACAANTTTTTCTTCATTT | |
| SY4307 | SY4307F1 | CCCATAA | | | 1024 |
| | | TACAACC | | | |
| | | CAGAAAT | | | |
| | | GGAA | | | |
| SY4307 | SY4307R1 | GTTTACG | | | 1025 |
| | | TACTATG | | | |
| | | CATGACC | | | |
| | | ACA | | | |
| SY4307 | SY4307A1FM | ATATGGG | G | | 1026 |
| | | ATTTCACC | | | |
| | | GTTATC | | | |
| SY4307 | SY4307A2TT | AATATGG | A | | 1027 |
| | | GATTTCA | | | |
| | | TCGTTATC | | | |
| SY4265 | | | | ATTCTNGGAAACAATATAAGNCATGCATAACAGAAGCCATTTGAAGATTTACCATTCACTAATTGTCATT | 596 |
| | | | | TAAGCAAGGTAAAAAAAATTAGTAGACNGTCTTTTAATCATGAATCGAACATAAAATAGATGGGTAACA | |
| | | | | TATAAATAAACAAGTTGTACCAGAAAAATAATTATTTTGGCAGGAAGATCATGCACTTACCTGTTGGTAC | |
| | | | | GTTTGAAGCCAAATTTGATAGGACAAGTATAACTATAGCAAGTATAGCTGTTNCACTAGCATGATCTATT | |
| | | | | CGAGAATAGGGCTCCATTAAGTCCCACATAGCACTAGGAATTCCAGTGGACTTAAAGCCCTCTACTGTG | |
| | | | | ATAAACATTCCACAGAAGAATACCAAAAGTGAATATGAGACCTGTTCCAAGAAGAAAATCACTTTAAGA | |
| | | | | GATTGTTCGAAGTTCAGTTGGCACAAGAATAACAATAGCTAGCATTTCAAATGGAAAAGAGAGAAAATG | |
| | | | | AGGTTTTGTACAAG[A/C]GGTTGTGTTATATAAGCTTTACCTTGTCTAAGCTTGGCCCTGCATCTTTGAAA | |
| | | | | TCAAGAACCACCAAAGTTATTGCAGCTGCAATTGCAGTCCATGCCATATTCAAACCAATGAGCATTGCAA | |
| | | | | TCAACATTACTAGTGTGATTGCATAAACACAAGATTTCCACAGTACCCTCTTCCATTTTTTGTTCATATAGT | |
| | | | | CCTTTTCTCCTGAAGAGAGTATAACAAGTGCTTCAATAGGTTTATCCACTACTATTGCAACATTTTTTGAA | |
| | | | | GGATTAGTTTCCTCCTTTGTATCATTTGTCCCTTCCTTGGATGCATTTGAGTTTGTTGTGAAATCCTTTGTG | |
| | | | | CCACTATGAACCATCTGAACTTCACTTTCACTTGGAGTTGATTGGTCTCTCATAACATGAACTTGGGAAG | |
| | | | | AGTTTTGAATACTATTAGCAAGTTCTACACTGCCATTGCATTCTTGAGAATTAAAGGATGTAAAATGAGA | |
| | | | | CATTCTGGCTGGAGAAAACTGA | |
| SY4265 | SY4265F1 | TTCGAAG | | | 1028 |
| | | TTCAGTT | | | |
| | | GGCACAA | | | |
| SY4265 | SY4265R1 | AGGGCCA | | | 1029 |
| | | AGCTTAG | | | |
| | | ACAAGGT | | | |
| | | AA | | | |
| SY4265 | SY4265A1FM | AACACAA | C | | 1030 |
| | | CCGCTTG | | | |
| | | TAC | | | |
| SY4265 | SY4265A2TT | AACACAA | A | | 1031 |
| | | CCTCTTGT | | | |
| | | ACA | | | |
| SY4297 | | | | TACGTATCCTTTTGGTTGATATGATAGCTAGGGAGTATGCCATATATTTGTGCTGCTAGTCTTCTTTTCAT | 597 |
| | | | | TTCTGCAATTTCTTTCCTGTCTACCAAGAACAATATGTTACATAAAATACAATTTATGCTTTGTGAAATTCT | |
| | | | | ACATGTACATCGGTACTTTTGCACCAAGGAAATAAGGGGAGGGGGATACTTTAAATTTGACAGTTTTGT | |
| | | | | ACTTTTGCTTGATTATTTGTTCATTTGTAAAAAATAATATATATAATGGTACATATTATTTTTTACACCCTA | |
| | | | | TCATTTATAGGTTGAATTTGAAGTATGGCAAGAGCTAGTATGAGTTGCTTATAATTGAGTTTTGTTCCTTT | |
| | | | | TTTTTACGTGTTTTGTTCCTTCTAAAATGCTGAAAAGTTTTTTTACNGGTAAACATTATTCTACAGTTGGTC | |
| | | | | TATGCAGCAGTATGCAATCCAAATTACACATTTATGCTATCAATACATAGAAAGCCTTTTCTTTCTCGCCA | |
| | | | | AC[A/G]CCAAGTATAACAAATATCTTATATATGAAGTAAAGCTTTTATGTAATAAAGGATATATGCACTA | |
| | | | | TTAATCTAAATATTGTTGGAGTAGAAATGTAAAGTGAAATNTNNNNNNNNNNNNNNNCTCAGATANA | |
| | | | | AGTGGAAAAGTTGAACAACATATAAGTAAGGAGAACAGCTATACACTTTTTAAGGTTTTAGGTTAAAAT | |
| | | | | GAANTGTCAAATCTCCTTTTATGATAAATTATAAAAGAAAGATTCGTTGTTAAAATTAATAAAGTAAAAA | |
| | | | | ATTATAATAAGATTTCTACTATTCAAATAATTGTACAAGAAGTTAAGAAGATATTCAAAAGAAAATAGCT | |
| | | | | AAAGAAGAAAAAGAGTTTATTACTTAATGAATAAATTATTTTATTAGCTTTATTATTTGACTAGGCATCAT | |
| | | | | ATATCTAGAATATAAAATAAGATATAAATTATAAAAGAAAGGTTGGTTGTTAAAATTAATAAAATAGAA | |
| | | | | AATTATAATAAAATTTCTAC | |
| SY4297 | SY4297F1 | ATGCAGC | | | 1032 |
| | | AGTATGC | | | |
| | | AATCCAA | | | |
| SY4297 | SY4297R1 | TTCACTTT | | | 1033 |
| | | ACATTTCT | | | |
| | | ACTCCAA | | | |
| | | CAATA | | | |
| SY4297 | SY4297A1FM | TTGTTATA | G | | 1034 |
| | | CTTGGCG | | | |
| | | TT | | | |
| SY4297 | SY4297A2TT | TTATACTT | A | | 1035 |
| | | GGTGTTG | | | |
| | | GC | | | |
| SY4279 | | | | TATAGATTCTAAAACATAAATGAAGTAAAATATTTATAAATTACTATGACAATAANCGGAGTATAAAACA | 598 |
| | | | | TGAACAAACTCATAGAAATCAAAGTCAAAATATTAAGAAAAAAATGTTAGCTGGCCAACAANNNNNGC | |
| | | | | ATTACCAATAAAAAAGAATCAAAACTATACTAATAATTGCAATCCANTTGATAATTATATTNTTACCANT | |
| | | | | GTTTCTTTTTNGCTAAAAGCAAGATACCACCACAATTAAAANGACCCTGAGACTAATTTTTTAAGACGTA | |
| | | | | GAAATTATTAAAATANTTTTTTTTCTTTCTTTCTTNNTTAGTAAAGTATTTTCTATGTGTATGAATAAAGAATCA | |
| | | | | AATTCTCGTCAATATACTCAAGAAATCCAATTATCATAGCAGTAAATTGTTATGCTATTTCTACTATATTGT | |
| | | | | TATTATGTTCCTTCTTTAGGAGAGAAATGACTCACATAGCATAGGATATAGATTTGGTNTAGTAATTAAG | |
| | | | | GAAATGGAGTATTGAT[A/G]AAATAAAAAAAACGTGATTCTTTACCNTTGAGATTAAGAGTAATGATAA | |
| | | | | AAAAANTTATTGAAAATTAAGAGTATCTCTTATGTTTAATCGATGTGGTCTCAATCATTAGACGATATTTA | |
| | | | | ATAAGATAAGATATTTTCCAACTACATCATNNNGTGCATCCTCCATATAATTACTAAATCCAAATCTCTTG | |
| | | | | TTATTCAAACACTATAACGACATCAAAGATGTACTCNAGCTATGTATTAGTTTCCTTTTTCTTTTCCCCTTT | |
| | | | | CAAAAAGAAAATAGTGCATAAGGGCCACTAATTTCTTTTTTAAANNTTGCTATGTGCCATACTTGGTAGG | |
| | | | | TGCAAACAAACAAAATAGAGTAGTTACATAGTTAACATGGAGGAAATTAAACTACATATGGGGTAGGTT | |
| | | | | CTAGCCCGATAGGACTATAAAANNNNNGATAAAACACCATTTTGGTCTGAAAGTGTAAATATAGTCACG | |
| | | | | TTAAATTCTCAAATTTTCATTTTTTTNAAAGTTC | |
| SY4279 | SY4279F1 | GGAGAG | | | 1036 |
| | | AAATGAC | | | |
| | | TCACATA | | | |
| | | GCATAGG | | | |
| SY4279 | SY4279R1 | TGAGACC | | | 1037 |
| | | ACATCGA | | | |
| | | TTAAACA | | | |
| | | TAAGAGA | | | |
| SY4279 | SY4279A1FM | AAGGAAA | A | | 1038 |
| | | TGGAGTA | | | |
| | | TTGATAAA | | | |
| SY4279 | SY4279A2TT | AGGAAAT | G | | 1039 |
| | | GGAGTAT | | | |
| | | TGATGAA | | | |
| SY4251 | | | | AAGAAATTCTATGACTCTCAAAATGCATGAAATCTGGTAAGTTCACAAAGGAAATATGAGGGGAGGTTC | 599 |
| | | | | AAGAAATTCTTTTAGAAAAAGCAAGAATTGGAAAACACGTAGAGCATACGTAAAAAACTCATTCAGTTA | |
| | | | | AGCATATTAGCAGCAAGGATATCATATAATACAGCATTTAATTCAACAGAACTGGAAAAGGAAAACAAT | |
| | | | | AACACAAACATCTATCACACATTTTACGTCCTACTCTTACCTGATAGAGGACTGAAGTAAGAGATTAATG | |
| | | | | GAGANAAATATGCTAATAGAGATAAGTGTTTTCCTTCTAACAGAATGCTGCTGAGTTTTTCCTTGGCCTG | |
| | | | | TTATTATTATTGCTTGTTTCAGTTAGAAGGCCCGTGGTGTCATCTTGCGTAAAAAGAAAAATATTTCACG | |
| | | | | GGGCTAATTACTTGAAAGCTCTATGAAAAGCTANGAACTTTTTGGTTTCCAAATTGGATTCAGAAACATT | |
| | | | | TTAATTTGTTTGG[A/G]AAATGGTGGAAGAGAATTGCAGCATCCTCNNNNNTGAAGACTATTGTTCAAG | |
| | | | | ACACTTCCACTTCATACCACTAGGTGAAAGGTGACCCTCTTTTNTATATGTGCACACTGGAAAATATATA | |
| | | | | AAAGTTCTAAAGGGCAACTTTAATAGCTTCCAATCAGAATTTATCTGACACAATAAACTATTTATGTATTT | |
| | | | | TTTTTTNNAAAATAAATTATACACTGATAATATAAAATAATTTTATATAATTTAATAATAAATTATCACATA | |
| | | | | AAATAAGCTGGTTGATCATTATAGTAACTTTTTTGAAACTCTTATTAACTATAATTTCTTGTTGAGGGAGA | |
| | | | | ATATGANTTTTTTTNTAACTTATACTACATAATTGNTAATTTTTTTCTTCAGCAATCAAATAAAAAGCACG | |
| | | | | AGATTTTTTTTNAATACTGACANATATTTTTATTAAATCTAGGACGTACCACTGTCTTTTTAATTGAAAAT | |
| | | | | GCCACTCACACATATACTTGCA | |
| SY4251 | SY4251F1 | AAGGCCC | | | 1040 |
| | | GTGGTGT | | | |
| | | CATCTTG | | | |
| SY4251 | SY4251R1 | TGGTATG | | | 1041 |
| | | AAGTGGA | | | |
| | | AGTGTCT | | | |
| | | TGA | | | |
| SY4251 | SY4251A1FM | CACCATTT | G | | 1042 |
| | | CCCAAAC | | | |
| | | AA | | | |
| SY4251 | SY4251A2TT | TCCACCA | A | | 1043 |
| | | TTTTCCAA | | | |
| | | AC | | | |
| SY4249 | | | | GATGAATGAGTCCTTTTTTTTAGCCAATAAGTGCATCTTTTATTGATTTGATTTACATTATATTTTATTTAA | 600 |
| | | | | TCTGTCACNNCATGTAACTGATGGAGATGGCATCCCCATCTTTGGTTCTAGTCATCACTTATGGATTGAC | |
| | | | | CACAACGACTCACTCTTCAATTGCACTGATGGCCTAATTGGTGCTGTTATGGGCTCCACTGCCATTACCAT | |
| | | | | TTCCAACAACTGCTTCATCCCCTAACTAGGTCGATCTACTAATTAATAGTCCTTTTGGTTAAAATATTTGAA | |
| | | | | GGAATTCTCTCATCATGTGTTTACTTTGTTTTAACCAAGTANTACGNCCATAGAGAGNTAGTGTTGAGTT | |
| | | | | TATTGACTTCAAAATTATTCAGGTTATGCTACTGGCTCAACGTGACTCTTATGTCCACGATCAGCATATGC | |
| | | | | AAGGAATCAATGCATACAACCATTTCGGGGAGAATCTTAACCAAAGAATGCCCAGGTAATTAACTAACA | |
| | | | | TCTTTTA[A/T]GTAGTAGTAGTATCTCTAGATATTTTACTTTTTTTTTTNNAATTGTATATGTCATTCCATCT | |
| | | | | AACATTTTGTTCAATTCTATGATAATAATTTTTATTACTTATTATTTTTAAAAATAGNCTTAGTTACTATTTT | |
| | | | | GNTCTTNTAATTTAATTTTNAAGTTCAATTTGATTCTCTTAATATTAAAAAGTTNAATTTNNTCCTCTNAN | |
| | | | | NNNNNTTTTTTTAAATGACTTAATTAGNTCCTTTTACTTTTAGAAGTTTCAATTAAGTCATTTATTTTTTAA | |
| | | | | AATAGGTTCAATTTGATCTTATTTTTCTTTCATGTGCTNCAANTTTTTTTNNNNAAAAATAAGATCANATT | |
| | | | | TGATTTTAAATAGGANAAAGTTGAANTTATTTTAAAAATTAAGGAACCTAATTNAAACTTCTAAANATAA | |
| | | | | AAGNACCTAANNGAAANACTTTTAAAAATTAAAGAACCTAATCAAACATTTTAATAATAANAGGATCAA | |
| | | | | ATTNAACTTCATANT | |
| SY4249 | SY4249F1 | ACTGGCT | | | 1044 |
| | | CAACGTG | | | |
| | | ACTCTTA | | | |
| SY4249 | SY4249R1 | TGAACAA | | | 1045 |
| | | AATGTTA | | | |
| | | GATGGAA | | | |
| | | TGACA | | | |
| SY4249 | SY4249A1FM | TAGAGAT | T | | 1046 |
| | | ACTACTA | | | |
| | | CTACATA | | | |
| SY4249 | SY4249A2TT | AGAGATA | A | | 1047 |
| | | CTACTACT | | | |
| | | ACTTAA | | | |
| SY4310 | | | | CCAGATTTCATTAAGGTGTAAAAAAACATGACAGTGTGTTAGATTTGAAAGTTAGAGCTAAAAAAGTTC | 601 |
| | | | | TTTATGAGATGGTTGTTCATATCTACATCTATATATGAAAGGATTTGTTGTAGTTATGTTCTTCAGGTCTG | |
| | | | | TGTTCAGTATTTGTCTCAAACATCTCTGTTCTATTTTCAATATTCATTGAAGTTAAATCTTTGGCTTGTATG | |
| | | | | ACAAATTGAAGGATGTTTACCTTGGTAAACAGAAGTGGAGGTTTAAGGTGAGAGTGGTTTGCATTTGTG | |
| | | | | ATATGTGTCAAGTTAGTGATCCCATTATCCACTTGAATTTGTACAGAGATGTTTGCAAAAATATATCACAA | |
| | | | | TGATGCTTTATACAAGGAATTGTGGCATGTCTGTGTCAACCTTTGACACTCTTTTGAGTGAAGGAGAGAG | |
| | | | | GGTTTATTACTTCCCTCAAGGTCATATGGAACACGTACAAGTTGTATGGGCATGTGCTCTTAATTTCTGAC | |
| | | | | TTTAATT[A/G]CAGTTAGATGCTTGTGCTACTATTATCTTGCTCCATATCATGTTTTGGATACTAGCATAAT | |
| | | | | TGTTTTGTTTCCATTTTCCAATTAAGATCTTATTGGTGTTGGCATGGTTCACCTAACAGTGTTTTCTCTTNA | |
| | | | | CAATTTTATCTATAAAATTTTTATTTTTCTTGATCTGACTTGTATGCTAGCAGGAGGCGTCTTTGTTTANGG | |
| | | | | TGTGTTTGCTGTAAGTTTTAAAATTGCACAAGTTGCGTCTGGTGGCATTTCAGTTTGGATATGTTAGATAT | |
| | | | | ATTGAACTCAGTTACTATTTCTATTTCCCCTTAAGTTTTAAATGTTAAAATAAATAAATAAATTGAGAGAT | |
| | | | | TAAACCAAATTTGGGTGTATTTTAATTATAGATTTCATGCCAGGATTTAGTGATTTTGGATTTCTTCAGTG | |
| | | | | TCAAGATTTGTTGGTTTATTTAATTTTAATTTATTTATTTTCTTGACTGATTTAATTGCCTTTGCTATTTTTG | |
| | | | | CAGTGTCTA | |
| SY4310 | SY4310F1 | GGGCATG | | | 1048 |
| | | TGCTCTTA | | | |
| | | ATTTCTGA | | | |
| SY4310 | SY4310R1 | GTGAACC | | | 1049 |
| | | ATGCCAA | | | |
| | | CACCAA | | | |
| SY4310 | SY4310A1FM | CAAGCAT | G | | 1050 |
| | | CTAACTG | | | |
| | | CAA | | | |
| SY4310 | SY4310A2TT | CACAAGC | A | | 1051 |
| | | ATCTAAC | | | |
| | | TGTAA | | | |
| SY4292 | | | | ATTGTCATAGTAATTTATAAATATTTTACTTCATTTATGTTTTAGAATCTATATCCTTTCTTTTAATTGAATA | 602 |
| | | | | GCAGGATCTAGTTATACAAACTGAAAAGAAAAGAACAATCATTATCAATGGGATAAAAAATATTCCTTTC | |
| | | | | TTGTCTAATATATCNTATTAACTATTTAATAGTGGAAATAAATTCCAATCATATGTTTTGTACTATGTCGA | |
| | | | | AATTTATGTATTTTAGTATATCAAATACTCATTTCTTGTATGGATTTTTTTTATATATAAAAAAAAAATNAT | |
| | | | | ACCCATACAACGTACTAATGTAATAGGTTCTCAAAGGCTTCCCTTGCGTGAATACTTCAAAAATATTTCAA | |
| | | | | CCTTTTGATGGAAGCAAGACGGAGAGATAAGATTGAATGTAAATACAAATATCACATCGATGTTAAAAT | |
| | | | | ATTAATTCATCCTATCCAAATTATCATTATGTTAATGTTTTGTGGAGAGTANCAATTGCAACATGGTATCA | |
| | | | | TGT[A/G]GTAGTTATTTCAAAATTACTTATTAAATATAAAGTGGTNTGAAGTGACGTAAGTGCAAGTATA | |
| | | | | TGTGTGAGTGGCATTTTCAATTAAAAAGACAGTGGTACGTCCTAGATTTAATAAAAATATNTGTCAGTAT | |
| | | | | TNAAAAAAAATCTCGTGCTTTTTATTTGATTGCTGAAGAAAAAAATTANCAATTATGTAGTATAAGTTAN | |
| | | | | AAAAAAANTCATATTCTCCCTCAACAAGAAATTATAGTTAATAAGAGTTTCAAAAAAGTTACTATAATGA | |
| | | | | TCAACCAGCTTATTTTATGTGATAATTTATTATTAAATTATATAAAATTATTTTATATTATCAGTGTATAATT | |
| | | | | TATTTTNNAAAAAAAAATACATAAATAGTTTATTGTGTCAGATAAATTCTGATTGGAAGCTATTAAAGTT | |
| | | | | GCCCTTTAGAACTTTTATATATTTTCCAGTGTGCACATATANAAAAGAGGGTCACCTTTCACCTAGTGGTA | |
| | | | | TGAAGTGGAAGTG | |
| SY4292 | SY4292F1 | GGAAGCA | | | 1052 |
| | | AGACGGA | | | |
| | | GAGATAA | | | |
| | | GATTG | | | |
| SY4292 | SY4292R1 | GCCACTC | | | 1053 |
| | | ACACATA | | | |
| | | TACTTGC | | | |
| | | ACTT | | | |
| SY4292 | SY4292A1FM | CATGGTA | A | | 1054 |
| | | TCATGTA | | | |
| | | GTAGT | | | |
| SY4292 | SY4292A2TT | CATGGTA | G | | 1055 |
| | | TCATGTG | | | |
| | | GTA | | | |
| SY4290 | | | | AAAAAAGAGGAGAATTTTCAAGGAATAAGTTGCTCTTGTATTTGACCTCTTCACTGCAGAAAGAAAATCT | 603 |
| | | | | CTCTTAAACAGTAAAGTCCCAAAAAGGAACAAATATGAATCATCAAAGGAAAGCAAATATCAAGCTTAT | |
| | | | | ACATTCCTCAGAAAAATGTTTCTCAGAGATAGCATTGCCTTTGAAGATCTTGGATATTCAGAGATAGACA | |
| | | | | CTGCAAAAATAGCAAAGGCAATTAAATCAGTCAAGAAAATAAATAAATTAAAATTAAATAAACCAACAA | |
| | | | | ATCTTGACACTGAAGAAATCCAAAATCACTAAATCCTGGCATGAAATCTATAATTAAAATACACCCAAAT | |
| | | | | TTGGTTTAATCTCTCAATTTATTTATTTATTTTAACATTTAAAACTTAAGGGGAAATAGAAATAGTAACTG | |
| | | | | AGTTCAATATATCTAACATATCCAAACTGAAATGCCACCAGACGCAACTTGTGCAATTTTAAAACTTACA | |
| | | | | GCAAACACACC[A/G]TAAACAAAGACGCCTCCTGCTAGCATACAAGTCAGATCAAGAAAAATAAAAATT | |
| | | | | TTATAGATAAAATTGTNAAGAGAAAACACTGTTAGGTGAACCATGCCAACACCAATAAGATCTTAATTG | |
| | | | | GAAAATGGAAACAAAACAATTATGCTAGTATCCAAAACATGATATGGAGCAAGATAATAGTAGCACAA | |
| | | | | GCATCTAACTGNAATTAAAGTCAGAAATTAAGAGCACATGCCCATACAACTTGTACGTGTTCCATATGAC | |
| | | | | CTTGAGGGAAGTAATAAACCCTCTCTCCTTCACTCAAAAGAGTGTCAAAGGTTGACACAGACATGCCAC | |
| | | | | AATTCCTTGTATAAAGCATCATTGTGATATATTTTTGCAAACATCTCTGTACAAATTCAAGTGGATAATGG | |
| | | | | GATCACTAACTTGACACATATCACAAATGCAAACCACTCTCACCTTAAACCTCCACTTCTGTTTACCAAGG | |
| | | | | TAAACATCCTTCAATTTGTCATACAAGC | |
| SY4290 | SY4290F1 | CCAGACG | | | 1056 |
| | | CAACTTG | | | |
| | | TGCAAT | | | |
| SY4290 | SY4290R1 | GTTGGCA | | | 1057 |
| | | TGGTTCA | | | |
| | | CCTAACAG | | | |
| SY4290 | SY4290A1FM | CAGCAAA | A | | 1058 |
| | | CACACCA | | | |
| | | TAAAC | | | |
| SY4290 | SY4290A2TT | AGCAAAC | G | | 1059 |
| | | ACACCGT | | | |
| | | AAACA | | | |
| SY4252 | | | | TATAAACTTNGACTAAAATAATTGGCAGATTACACTTTNAGTAATATTTTTTTTAAAAAAAAAANCTNAC | 604 |
| | | | | TTTTATATAATATGACAGTGTNATATACACTTTCAACGACCTAAATGATGTGCTATATCCCANAANGTGA | |
| | | | | TCAAAATCTCAAAATGCACGAATATTCACTTCCTTCATAAACAAGCCTACTCTAAGTAAATAAAAGGACC | |
| | | | | CATAATACAACCCAGAAATGGAAAACAATTAAGAGCTAGCANACGTAAAAAANTTATTCAGTAAAATCA | |
| | | | | GCATATATATTAATATTTAAAACAATATATTTACAAATACGTTGCATCTCAAAGATAACGNTGAAATCCCA | |
| | | | | TATTCTCTTTATTTCATTTTAATTTATGTGGTCATGCATAGTACGTAAACATATTGTGCAAATAATCATCAA | |
| | | | | ANTAATCATACATAACGTTTAATTTAATAAAACTGCAAAAGGAAAACAGCAAAAACGTTTATCAAACTTT | |
| | | | | TTTACATC[A/G]TAGTCTTACCTTATAAAGAAAATTCNTTCATGGGCTTCGATATAACTTGGAATTCCACA | |
| | | | | CCTTGCAGTCCTTGCATTGGATTTACTTCATGAAAAAGCTATAAACGTTTTGTAAGTCTTTTTCGGGATTG | |
| | | | | AGATTTAGAAATATTTTAATCTATTTGGAAAATAAGAGAAGAGAACTGCAGCATCCTTAAAGCTGAAAA | |
| | | | | CCTATCACGAAAACTTCATACCACATGCTGAAAGGTGACTTTCTATTATATAAGTGCACCTGGAGGATAA | |
| | | | | GAAGAAAATGGCAACTTCGGTAATAACTTCCAATTTAGAATTACACGAATGAACAANTTTTTCTTCATTTT | |
| | | | | TAAANAAGTAATTAAATTTGAGGCACGTGATAATTTCTCGAGACCAACAACTTTTTAATTAAATCGTGGG | |
| | | | | TATATATATATATACTAGTAGTCCACTACTTATAATTGAAAATGTTAGAGTAAATGATCAATTATATTTTG | |
| | | | | TTTCTGAAAGCGTGTGATG | |
| SY4252 | SY4252F1 | ATGTGGT | | | 1060 |
| | | CATGCAT | | | |
| | | AGTACGT | | | |
| | | AAAC | | | |
| SY4252 | SY4252R1 | CAATGCA | | | 1061 |
| | | AGGACTG | | | |
| | | CAAGGT | | | |
| SY4252 | SY4252A1FM | TAAGGTA | G | | 1062 |
| | | AGACTAC | | | |
| | | GATGT | | | |
| SY4252 | SY4252A2TT | TTATAAG | A | | 1063 |
| | | GTAAGAC | | | |
| | | TATGATG | | | |
| SY4246 | | | | GATCCTGCTATTCAATTAAAAGAAAGGATATAGATTCTAAAACATAAATGAAGTAAAATATTTATAAATT | 605 |
| | | | | ACTATGACAATAANCGGAGTATAAAACATGAACAAACTCATAGAAATCAAAGTCAAAATATTAAGAAAA | |
| | | | | AAATGTTAGCTGGCCAACAANNNNNGCATTACCAATAAAAAAGAATCAAAACTATACTAATAATTGCAA | |
| | | | | TCCANTTGATAATTATATTNTTACCANTGTTTCTTTTTTNGCTAAAAGCAAGATACCACCACAATTAAAAN | |
| | | | | GACCCTGAGACTAATTTTTTAAGACGTAGAAATTATTAAAATANTTTTTTTTCTTTCTTNNTTAGTAAAGT | |
| | | | | ATTTTCTATGTGTATGAATAAAGAATCAAATTCTCGTCAATATACTCAAGAAATCCAATTATCATAGCAGT | |
| | | | | AAATTGTTATGCTATTTCTACTATATTGTTATTATGTTCCTTCTTTAGGAGAGAAATGACTCACATAGCATA | |
| | | | | GGATATAGATTTGGT[A/G]TAGTAATTAAGGAAATGGAGTATTGATNAAATAAAAAAAACGTGATTCTT | |
| | | | | TACCNTTGAGATTAAGAGTAATGATAAAAAAANTTATTGAAAATTAAGAGTATCTCTTATGTTTAATCGA | |
| | | | | TGTGGTCTCAATCATTAGACGATATTTAATAAGATAAGATATTTTCCAACTACATCATNNNGTGCATCCTC | |
| | | | | CATATAATTACTAAATCCAAATCTCTTGTTATTCAAACACTATAACGACATCAAAGATGTACTCNAGCTAT | |
| | | | | GTATTAGTTTCCTTTTTCTTTTCCCCTTTCAAAAAGAAAATAGTGCATAAGGGCCACTAATTTCTTTTTTAA | |
| | | | | ANNTTGCTATGTGCCATACTTGGTAGGTGCAAACAAACAAAATAGAGTAGTTACATAGTTAACATGGAG | |
| | | | | GAAATTAAACTACATATGGGGTAGGTTCTAGCCCGATAGGACTATAAAANNNNNGATAAAACACCATTT | |
| | | | | TGGTCTGAAAGTGTAAATATAGTCACGTTAAAT | |
| SY4246 | SY4246F1 | GGAGAG | | | 1064 |
| | | AAATGAC | | | |
| | | TCACATA | | | |
| | | GCATAGG | | | |
| SY4246 | SY4246R1 | TGAGACC | | | 1065 |
| | | ACATCGA | | | |
| | | TTAAACA | | | |
| | | TAAGAGA | | | |
| SY4246 | SY4246A1FM | CCTTAATT | G | | 1066 |
| | | ACTACAC | | | |
| | | CAA | | | |
| SY4246 | SY4246A2TT | TTCCTTAA | A | | 1067 |
| | | TTACTATA | | | |
| | | CCA | | | |
| SY4314 | | | | AATTGCAGCATCCTCNNNNNTGAAGACTATTGTTCAAGACACTTCCACTTCATACCACTAGGTGAAAGG | 606 |
| | | | | TGACCCTCTTTTNTATATGTGCACACTGGAAAATATATAAAAGTTCTAAAGGGCAACTTTAATAGCTTCCA | |
| | | | | ATCAGAATTTATCTGACACAATAAACTATTTATGTATTTTTTTTTNNAAAATAAATTATACACTGATAATAT | |
| | | | | AAAATAATTTTATATAATTTAATAATAAATTATCACATAAAATAAGCTGGTTGATCATTATAGTAACTTTTT | |
| | | | | TGAAACTCTTATTAACTATAATTTCTTGTTGAGGGAGAATATGANTTTTTTTNTAACTTATACTACATAATT | |
| | | | | GNTAATTTTTTTCTTCAGCAATCAAATAAAAAGCACGAGATTTTTTTTNAATACTGACANATATTTTTATT | |
| | | | | AAATCTAGGACGTACCACTGTCTTTTTAATTGAAAATGCCACTCACACATATACTTGCACTTACGTCACTT | |
| | | | | CA[A/C]ACCACTTTATATTTAATAAGTAATTTTGAAATAACTACNACATGATACCATGTTGCAATTGNTAC | |
| | | | | TCTCCACAAAACATTTAACATAATGATAATTTGGATAGGATGAATTAATATTTTAACATCGATGTGATATTT | |
| | | | | GTATTTACATTCAATCTTATCTCTCCGTCTTGCTTCCATCAAAAGGTTGAAATATTTTTGAAGTATTCACGC | |
| | | | | AAGGGAAGCCTTTGAGAACCTATTACATTAGTACGTTGTATGGGTATNATTTTTTTTTTATATATAAAAAA | |
| | | | | AATCCATACAAGAAATGAGTATTTGATATACTAAAATACATAAATTTCGACATAGTACAAAACATATGAT | |
| | | | | TGGAATTTATTTCCACTATTAAATAGTTAATANGATATATTAGACAAGAAAGGAATATTTTTTATCCCATT | |
| | | | | GATAATGATTGTTCTTTTCTTTTCAGTTTGTATAACTAGATCCTGCTATTCAATTAAAAGAAAGGATATAG | |
| | | | | ATTCTAAAA | |
| SY4314 | SY4314F1 | GCCACTC | | | 1068 |
| | | ACACATA | | | |
| | | TACTTGC | | | |
| | | ACTT | | | |
| SY4314 | SY4314R1 | TGATGGA | | | 1069 |
| | | AGCAAGA | | | |
| | | CGGAGAG | | | |
| | | AT | | | |
| SY4314 | SY4314A1FM | ACGTCAC | A | | 1070 |
| | | TTCAAAC | | | |
| | | CA | | | |
| SY4314 | SY4314A2TT | ACGTCAC | C | | 1071 |
| | | TTCACACC | | | |
| SY4264 | | | | ACTGACTTATATTGATCTATATTTTACTTTTTTATCTAAATTTTTACAGATTCAAAAGAAAAAAATAAAAAT | 607 |
| | | | | TAAAAAAAATATATTATATCAAAATAGGCTCAATTGAATTCACACCAATATTTTTTGAGTCCAATATAACC | |
| | | | | TGATAGTAGACTAGTCCAAATAGTCACAATTCTATTTGGATTAACATTTTATTAGTCTAACTCGACCTGAA | |
| | | | | TCAATAGGCCAACAGTGAACTAGCTGATGCGGTCCATTTTGCGAGCTCTATATGGAAGGATGGTTTTTTT | |
| | | | | GGCACATATATCATGCATATATGTGTCACTTTCATAGTTCAATAGAAAAAAAGTCAAGTAATTGACAAAA | |
| | | | | TTAAAAACCAATTCATTACTTAAAAGTGGGGTCGTAGTTTGCTGAATGCCCCACGCACAGANAGTAATTG | |
| | | | | GAGGAAAGTAAATTCTGCTGCCAAAGATTTCACATAACTCCCAAACTAACATTCATTACTAATTGAAATTT | |
| | | | | CAAA[*/A]GCATTCCTAACAAACTTTTAGCTAGGACCATCACAATCATATACTTATTTGANGATATTAACA | |
| | | | | ACAAAAACAGAGAAAATTCCTTGTTCATCTACCTATATTTTCTAACACAACGTTAAAATACATTACAATTA | |
| | | | | ACTGACTTTGCTTGTGTAAACTTCTACGATAAGATTCTTTGGATTTTTAGTAAACTCTTATCATTTTATGAG | |
| | | | | TGTCAACCCAATAGCAGTGACTATAAGAGTTGAAGGAAGGCCAACTTTTAGATGAGTCCAAAAGGTTAA | |
| | | | | TGTGTATCCAAGGTTTGGAGCTCGACGAGCTTGTTCACACACTATCAAGTTGGCAGCTGATCCTAATAGT | |
| | | | | GAAAAGTTCCCTGCTATAGTGCTAACCCAAGCTAAGATTAGCCATGCCCTCTCCTCATCTCCTTTGGAAAT | |
| | | | | TGCAGCAGCTGAGGCTGCAACTCTTGCTCCAAGCAATAGAACTAGAAAACATATGAATAGAAGATTGTG | |
| | | | | ATGCATCAAATGAAA | |
| SY4264 | SY4264F1 | GAGGAAA | | | 1072 |
| | | GTAAATT | | | |
| | | CTGCTGC | | | |
| | | CAAA | | | |
| SY4264 | SY4264R1 | GATTGTG | | | 1073 |
| | | ATGGTCC | | | |
| | | TAGCTAA | | | |
| | | AAGT | | | |
| SY4264 | SY4264A1FM | TTGTTAG | I | | 1074 |
| | | GAATGCT | | | |
| | | TTTGAAAT | | | |
| SY4264 | SY4264A2TT | TTGTTAG | D | | 1075 |
| | | GAATGCT | | | |
| | | TTGAAAT | | | |
| SY4416 | | | | GAATAGCTATAACTAGATTCTGGGGGTTCCCAATTGGGGTTGCTGAGGATCCAATATTAGCACTTGAAG | 608 |
| | | | | CTAGTGCAAGAAGGAAAGGGTAAGGTGGGAGGTTATGTTGCCTTGCTATTTTCAACACAAATTCAGTCA | |
| | | | | ATACAACACAAGATGTGTCATTGGTGAAAAAGGCACTTGATATAGCNGAAATTAAACAAATTCTACAGA | |
| | | | | GTAAGTCCTTTGGTCCTTGGCTTTTCCAAGAGAGCAATTTCCCCAAGTACTTGAACATGTCTGCTCTTTCA | |
| | | | | AGAAAAACAGTAACAACCATTGTCCCAAAAAGAAGACCAAGAATTGGGAGATCAATTGCAGCAAAAGC | |
| | | | | TTGATCTGGATTAAGAACTTTGAATATGACCATAAACATTGCACCTAGTAGGGACCCTGCAGTTCTCCCA | |
| | | | | ATGGGTAGAAAAGGCACACATGGGAAAACTGCTAGAACCCAGAAAACTGCAAAGGCTATTGAGCCAAA | |
| | | | | GACAACTGTTGGAGTA[A/G]GAGCCAATGCCATTGTTGTGGTTAAACAAGCAACAATTTCCAAACAAAT | |
| | | | | GTTAATTCAAGCCTCCACTTCTAGGCGAACACAATAGAATTTTGTTTGGTACAATTTCCTGAACATGGAA | |
| | | | | AGCCAATTGATTAGTAACTTTGTAAGAGTGCATGAAAAACCAATCTATTATATTCCTCTTCTTATTCAATC | |
| | | | | TACTACTTTGAGACATGAATTAAGTGAATCATTATTATTGAATATTAATGATCAAGCGGGAACGTGGATC | |
| | | | | GGAGTATGAATATATTGTTTATGGTATTTGACAGAGGTCTGCTACATCACATGAATACAGGTATCGTATA | |
| | | | | CTGTGGGTTAATTAAATTTTTGCAAACAGATAAATAAATTAAATATGGACAAGACATTTGAATTTGATGT | |
| | | | | ACTATAAAACATGCCAGCAGTGTATTAAACATAAAATCACATGACTTTCCAAGCATAGCATAAAAATTAA | |
| | | | | AGGAAGCAATTATCTTGAAAAACAACTTAA | |
| SY4416 | SY4416F1 | GCAAAGG | | | 1076 |
| | | CTATTGA | | | |
| | | GCCAAAG | | | |
| | | AC | | | |
| SY4416 | SY4416R1 | GCCTAGA | | | 1077 |
| | | AGTGGAG | | | |
| | | GCTTGAAT | | | |
| SY4416 | SY4416A1FM | CTGTTGG | A | | 1078 |
| | | AGTAAGA | | | |
| | | GCCAA | | | |
| SY4416 | SY4416A2TT | TGTTGGA | G | | 1079 |
| | | GTAGGAG | | | |
| | | CCA | | | |
| SY4426 | | | | ATGTTCTAATGCTCGACCTTCACGGTGGTGAGTTTAATTATATGAGCGGAGAGATCCACAAGTCGTTGAT | 609 |
| | | | | GGAGTTGCAACAATTAAAGTATTTAAACCTCAGTTGGAATTCTTTTCAAGGCAGAGGAATCCCAGAGTTT | |
| | | | | CTTGGTTCTCTCACCAACTTGAGATACCTTGATCTGGAATATTGTCGTTTTGGCGGAAAAATTCCAACTCA | |
| | | | | GTTTGGCTCTCTTTCTCATTTGAAATACTTAAATCTTGCTTTGAATTCTCTGGAGGGTTCAATCCCTCGTCA | |
| | | | | ACTTGGAAATCTCTCCCAGTTGCAGCATCTTGATCTCAGCGCCAATCATTTTGAAGGAAATATACCCTCTC | |
| | | | | AAATTGGAAATCTCTCCCAGTTGCTGCATCTTGATCTCAGCTACAATTCTTTTGAAGGAAGTATACCGTCC | |
| | | | | CAACTTGGGAACCTTTCAAATTTGCANAAGCTTTATCTTGGAGGCGGTGCTCTCAAAATTGANGATGGA | |
| | | | | GATCAT[A/T]GGCTGTCTAATCTCATTTCTTTAACCCATCTTTCCGTGTTACAGATGCCTAATCTCAACACT | |
| | | | | TCTCATAGCTTCCTCCAAATGATTGCCAAGCTACCAAAACTTAGAGAACTGAGTTTAAGTGAATGTAGCC | |
| | | | | TTCCCGATCAGTTTATCCTTCCATTGAGGCCCTCTAAATTCAATTTTTCTAGTTCCCTTTCCGTCCTTGATCT | |
| | | | | TTCCTTCAACAGCCTCACGTCATCAATGATACTCCAGTGGCTGTCCAACGTCACTTCCAACCTTGTTGAGC | |
| | | | | TTGACCTTAGTTATAACCTCTTGGAGGGTTCCACATCAAACCATTTTGGCCGTGTAATGAATTCTCTTGAG | |
| | | | | CACCTCGACCTCTCATATAATATATTCAAGGCTGACGATTTCAAATCCTTCGCGAATATATGCACCTTACA | |
| | | | | TTCTTTATACATGCCAGCAAACCATTTGACTGAAGACCTTCCATCAATCCTTCATAATTTGTCTAGTGGTT | |
| | | | | GTGTTAAACAC | |
| SY4426 | SY4426F1 | ATCTTGG | | | 1080 |
| | | AGGCGGT | | | |
| | | GCTCT | | | |
| SY4426 | SY4426R1 | TGGAGGA | | | 1081 |
| | | AGCTATG | | | |
| | | AGAAGTG | | | |
| | | TTG | | | |
| SY4426 | SY4426A1FM | TGGAGAT | A | | 1082 |
| | | CATAGGC | | | |
| | | TGTC | | | |
| SY4426 | SY4426A2TT | ATGGAGA | T | | 1083 |
| | | TCATTGG | | | |
| | | CTGTCT | | | |
| SY4427 | | | | ACACATGGAGATGANGCAGGCCTAATGCTTCCCCCAAAGATTGCACCAATACAGGTACATTTGGATGCT | 610 |
| | | | | ATTGATGTCTTAACCTTGATGTGTAGACACCATTAGTTAAATTTTGCTGTTGAAAGTTGGAATACTTTGCT | |
| | | | | CCTTGGTCAGGCAAATATGAAAATAAAGGGAATGCTTACTTAAAATGAAAAAGACTCTTCTACTCCGAA | |
| | | | | GTCCAAACTCCTACATGCAGNTACAGGATTATGTTCCATGCCTGTACTTTTATATTGTAATTTAAATAAAT | |
| | | | | TATAANTTTTTCATTTTTGACAAAATCATGGTGTGTGTTGCCTGGTTAGGTGGTAATTGTACCCATTTGGA | |
| | | | | AGAAGGATGATGAAAAAGAGGCAGTTCTAAATGCAGCATCATCTGTAAAAGATGTTCTTCAAAGATCTG | |
| | | | | GGATTAAAGTTAAACTTGACGACTCNGATCAAAGAACTCCTGGATGGAAATTCAATTTCTGGGAAATGA | |
| | | | | AGGTTTGTTTT[A/T]AAACTTGAATGGAAATTCAATTTCTGGGACCAAATAATGCGCATTGCTTTGGCTC | |
| | | | | ATGCTGCAGGATCTTTGAGTGTTTGATTATATTTATATCATTTACTTCATATTTAGGGAGTTCCTCTTAGA | |
| | | | | ATTGAAATTGGTCCTCGTGATGTGGCTAGTGGAAGTGTGGTGATATCCAGGAGAGATATCCCTGGGAA | |
| | | | | GCAAGGGAAAGTGTTTGGAATCTCTATGGAGCCTTTAAATTTGGAGGCTTATGTTAAAGACAAGTTGGA | |
| | | | | TGAAATACAGTCATCTCTTTTGGAAAGGGCAATTGCATTTCGAGACAGGTTCATTCCTTTAATGCTACTTT | |
| | | | | TAGCCTGGAACTCCTTAACATAACCTTGTCTAACATGCGTTGAATTGATTTTTTCAAAATAATCTCATTTAT | |
| | | | | TTATTGATAATAGTCACATTAATCATCTTTCCTGAATTGAAGAATGTTAATGGTAGCAAAATGCATAATCT | |
| | | | | TGGGTTCTGTCAAAACAATGTTG | |
| SY4427 | SY4427F1 | GGCAGTT | | | 1084 |
| | | CTAAATG | | | |
| | | CAGCATCA | | | |
| SY4427 | SY4427R1 | GCAGCAT | | | 1085 |
| | | GAGCCAA | | | |
| | | AGCAATG | | | |
| SY4427 | SY4427A1FM | AATTTCC | T | | 1086 |
| | | ATTCAAG | | | |
| | | TTTAAA | | | |
| SY4427 | SY4427A2TT | AATTTCC | A | | 1087 |
| | | ATTCAAG | | | |
| | | TTTTAAA | | | |
| SY4421 | | | | TTTTTTTTTATCAATCTGCTTAATAAAGATTTGCATTCAACATGTTATCGAGATGAAACTTCAATTCTGATT | 611 |
| | | | | AGAGAGCAGCACCAAAAGACTGCAGTTATGTTTTGTGCTTATCTTTATGGAAAGAGAATGGTGCTCAGG | |
| | | | | AATTGGGTTTTGATTTTGTGTGTTTGTATTTTGCAGCTGGGGTTACCCCTTTTGTGGTGGCAGGGATTGA | |
| | | | | ATTTAGCAAAATAATTGTAAGTCACTTTTTTTGGTTGAGCTGCTAACTCATAAGTTATGAAGCCCGTGTTT | |
| | | | | CATGTCTTCATTGTTGGATATGTTCCAGATAGCTCAAAAAAGATGTGAGGTGTGTGGAGGGTCAGGGCT | |
| | | | | TGTTCTTAGGGAAAAGGAAAAGGACTATCTCCGTTGCCCAGAATGTGGTATGATTGCATTCACTTCTCCT | |
| | | | | TCTCATATCATGTACTCCATTTAACCAATTAAGTATGCAGCTGGGAGAATGTTATTGTATGTCTCTAAAAT | |
| | | | | ATTGCTAA[A/C]TTATGGGACTTTTTGATGTCTCAGTAATTGAACATCATATTCAGTATCTTGAATGTGTG | |
| | | | | TAGTTATAAATTATTTGGATGTACATTGAACACCTAGGAATTGCAGAAATCCCTGCATTCCCAAGCTAATT | |
| | | | | TGAATATCTATTGTCAACATGAGAATATTTTGATGTCGAAGAGGAGATATTTTTCATAGATCCTCTTCTTG | |
| | | | | ATATTAGAAAAGATAGAAGGTATGTTGCTGCCTGCTCCTGTTCTTATTTGCTTTTACATTTCTTTTCCAAG | |
| | | | | AAATTATTAGACACTATGGATTCATCATATGCTTCCTCTTCTTGGTTCTTTTCTGCATTTATGTAATAATAT | |
| | | | | GACTTTTTTACTCTTTCAATTCCAATTAATGTATAGGAGAAATGCTAGTCCAATTTTTACAACTCATTAAGT | |
| | | | | AAATTAATTTTCATGTTACATTATGTGGTGTGGTTGTTCCATGTGACATGTAATCATATTTTTCAATATGA | |
| | | | | AAAAGAGTTAATA | |
| SY4421 | SY4421F1 | GCAGCTG | | | 1088 |
| | | GGAGAAT | | | |
| | | GTTATTG | | | |
| | | TATG | | | |
| SY4421 | SY4421R1 | TTCTGCA | | | 1089 |
| | | ATTCCTA | | | |
| | | GGTGTTCA | | | |
| SY4421 | SY4421A1FM | AAGTCCC | C | | 1090 |
| | | ATAAGTT | | | |
| | | AGCA | | | |
| SY4421 | SY4421A2TT | AAAGTCC | A | | 1091 |
| | | CATAATTT | | | |
| | | AGCA | | | |
| SY4437 | | | | TGGAGGAGATGGTGGTGAGGGTTTTTTGGAATCATTGTTCCGGTTGGATAAAAGATTGAGGAAAGTAC | 612 |
| | | | | GTAAAAGAAAGAGGATGATGAAGGTAACAACTGGGAGGAAGAACCAACTTGAAGAGTTTTCTTGCTGA | |
| | | | | GAGATCCACATTGGGTTTCTCAGTTGATAGATGATGCAATGACTCGGGCTGTGTGTAGTATCTTTTCTTT | |
| | | | | ATAAGGTAGCGTTGGAGGTCCTCACCAGCTACGTGTTTGTGAAAAATATGTATTTTTTTTTATCGGTAGA | |
| | | | | AGTTTATAATATTACGCATCTTATGCAATCGATTGAATTAGAGTAAATAATTAATCTGTCACTTTTTTATCG | |
| | | | | TTGAATATATAGTATGGGATATATAAATTCTTTTCTAGAAGGAAATAAGGATAGAAAAAACAGAAAAAC | |
| | | | | AAGTAATAAATATCACCATCATTCATCAATGGCGGCTGCAAAAATTTGGTAAAGGAATTATCAATTAATT | |
| | | | | AGTCCAAAAAATA[A/G]TGTAACAGAAAGAAAGAGCCACGTAGAATGAAGAATCTTATGCTAGATGAA | |
| | | | | ATTTTCTACACTTATTTATATTATTTTTAGAAGCTTCTACACTTATTTCAGTCGTTATTGATGGCTTTTCGAC | |
| | | | | AAGCTAGGCTCCTATTGGAAGGGCGGACTGGACTGTAAGTCATATATGGATGCTGCAATTAATAATGTA | |
| | | | | AAGCAACTATGAAGTGGATAATATTGTTTGATCCTGACATATATGTTTTAGGGTAATTTCTGCATTAGGT | |
| | | | | AACATGTTTTAATTGATGGTTTAATTATTCATGAATAATATACTTGTAACTATTAATAGTTATATAGAGTA | |
| | | | | TTTGGTAAAGCTAGGTTAACCATGGGGTCTTCCAAGAGAGGTGGGGAGCTAGGTAACAATCTTTC | |
| | | | | GTAGTAGTTTGGAGTAGAATACTAACTAAAAAATTTGGTCGTTTCTTGTTAGATCGAGGATGATACATGG | |
| | | | | ATATTTATGTTTTTTTTTATACATTTA | |
| SY4437 | SY4437F1 | ATTCATC | | | 1092 |
| | | AATGGCG | | | |
| | | GCTGCAAA | | | |
| SY4437 | SY4437R1 | AAGATTC | | | 1093 |
| | | TTCATTCT | | | |
| | | ACGTGGC | | | |
| | | TCT | | | |
| SY4437 | SY4437A1FM | TCTTTCTG | G | | 1094 |
| | | TTACACT | | | |
| | | ATTT | | | |
| SY4437 | SY4437A2TT | TTCTTTCT | A | | 1095 |
| | | GTTACAT | | | |
| | | TATTT | | | |
| SY4428 | | | | TGACAAGAGATATACATTTCAATTGAAGTTGTTAAAATTAGAGTTGAGAACATGTTTTGTCATTATTTTAA | 613 |
| | | | | GATGACATTTGAATATACATTTCTTTTAAATTAATATAATTTTATTAAGAGAAAGCCAATTCATCACAAGG | |
| | | | | AGTACCAAAGACCAGCTTACACAAATATTGTTGGTACAAGAGTATTACAAAATAACAACTGAAACAGAA | |
| | | | | CACCCCTCACATAAATCCATACAAAATAGGATGCATTAGGACCAACTACATTGCCCTCACCATAAAAAAG | |
| | | | | ACCAAAGTAAATGTTCTTGACAGAACCATAAAATCGACAACTTCAAACTACACACACTATAGCCAGAGA | |
| | | | | GTTAAGCATTACATTACAAGATAAAATCACTTCCAAGTGAATCAAAATTGCTTGACCAATTGTCCAATTCC | |
| | | | | ACGCTCTGTGCCACCAAGCTGATCCAATGATATATGAAAGACATTGCTGCTGCACCGGTTGATTCATCAT | |
| | | | | CATTAATCC[A/G]ATTGAATAGGGAAATGATACATATATATGAAATGTGGCTAGACACATTGTTATGATA | |
| | | | | GGCAAAATTATTTAAATGGATTAGCAGCAGAGGATGACTAAAGTGAATCAGGTGCACATTTCCGTTTTCT | |
| | | | | TGTGATGCTGCTTGTGTTCTATATAGAAGGCTACCTCTGATTTTAAAGCTCTGGTCTTGTCCACACACTCT | |
| | | | | TCTATAGTAAATTTTAGTTCTTATCATTATTTTTGTAAATCTTTTATTTGTAGGTTGAAGATGCCTCAAATT | |
| | | | | AGTCTAACACAAATCGACGGTTCATTTTTTTTTTTTTTAATTAGATTAGGGGAAGACATACCCCTTTACAA | |
| | | | | TTGCAAGGTCAAGGAAGACCACCAACTTCACTGAGAATTTAGAAGAATTTACACATCATTTATCAATGAT | |
| | | | | TAATACGAGAGTCGAACTCAAGTCATAGTTTTTATGAGTAGAAGACTCGTTCAGAGGTGTCAACGCTTAT | |
| | | | | TAGTAGAACAGTTCGTTTT | |
| SY4428 | SY4428F1 | ATTGCTG | | | 1096 |
| | | CTGCACC | | | |
| | | GGTTGAT | | | |
| SY4428 | SY4428R1 | GTCATCC | | | 1097 |
| | | TCTGCTG | | | |
| | | CTAATCCA | | | |
| SY4428 | SY4428A1FM | CATCATC | A | | 1098 |
| | | ATTAATC | | | |
| | | CAATTGA | | | |
| | | ATA | | | |
| SY4428 | SY4428A2TT | CATCATC | G | | 1099 |
| | | ATTAATC | | | |
| | | CGATTGA | | | |
| | | AT | | | |
| SY4362 | | | | CTAGGNTGTTATAGTTTTAATTATTTTTCGTTTGTGAGGATAGTTTTTGATATATACTTATTTTTTAAAATC | 614 |
| | | | | AATATACATAATTAAGTAATTAAAAATGTTAAATTAAAATAGATTATGTAATTATTAAAATTTTAAAAATT | |
| | | | | ATCATTCTTTGTTGAAAATACTTGATTTAAATCTTAAGTAGTATAATTTAAAAAGATAAAGACATGCACTT | |
| | | | | ATT[TAAT/AAATTTTCTTTTAAAATTATTGAAGCTAAATTTTAATTTCTCCAATCCCCCCGCAAAAAAAA | |
| | | | | AAGGATCATATTAGCGATTAAGATTTAGCAGGTGGAATGAAATTTCAGAGGTTCCTATCTAGGTCATA | |
| | | | | CAAATTGATAATTCATATCATAATAAAAAATTAATGTGATGAGAAACTTTTGTTTGTTCTATTTCTGTAT | |
| | | | | TTCCCTTCAATATTCCAGTTATTTTGTGAGACACGATATAATGCTTGGGGCAGTGCTGGAGCTTGAAAC | |
| | | | | AAAAAATTGGGAGTCAAAAAT]AAGATTGGAATGAAAAAAATATTCATAGATTTTTCATTTTATAATCTC | |
| | | | | ATCTAAATTTTTTTAATATTTTTTTAAAAAAATCTTAAAATAACTTATCATGCAATAATTTTTTACTAATTAA | |
| | | | | GTTATTCAACCCATCATATCAATATCAAGTAAAGATAATTATATTTTTAAAAAGTTAAGTGC | |
| SY4362 | SY4362F1 | TCATTCTT | | | 1100 |
| | | TGTTGAA | | | |
| | | AATACTT | | | |
| | | GATT | | | |
| SY4362 | SY4362R1 | TTGATATT | | | 1101 |
| | | GATATGA | | | |
| | | TGGGTTG | | | |
| | | AA | | | |
| SY4362 | SY4362A1FM | CAATCTT | D | | 1102 |
| | | ATTAAAT | | | |
| | | AAGTGCA | | | |
| SY4362 | SY4362A2TT | GTATGAC | I | | 1103 |
| | | CTAGATA | | | |
| | | GGAACCT | | | |
| SY0574AQ | | | | AACCCTCTAACTATACTTATTCTCTGACAACCGTTTATAAAGTTTATCTAAACAGGACTTTACTTAGTTCCA | 615 |
| | | | | CCATTCAAAAAAACATGATTTTGTAGCTTATGCATAAGTTCACTTCAACTTATGGAGGAACTTCTTTCATC | |
| | | | | TCTCTTCTTATTTTCTTCTCATATAAGTACTCAGGGAAAAGTTTATTCAAACAGACCCTAAACCTTGATTTT | |
| | | | | ACTCTCAAACATATTTTTGGAACACTCCCATCGAAAATCCAGACACACCCTTAATTTCCCAGCATTCAAAA | |
| | | | | CCCTCTTTTAGGGTTCCATTCACAGAGCAAACACGTTCCAAACAAAAGAAGACCAAAGATTTCGGCACTC | |
| | | | | AGAGNGGAAAAGNTTNGAACTTTGACACTCCCAAGGAGTCACTNAGAAGGGTTTGTTTCGTGGGGAGT | |
| | | | | TTTGGCGACGATGGAGAGGGCGTGGAGGCCGCTCTGGAGCTCGTCGGCGAGGAGGTCGTAGATGAGA | |
| | | | | CGGTGTCGTTTGAC[A/G]AGGCTCTGGCCCTCGAACTTGGGGGAGACGATGTTGAGGTTGAAGTGGGT | |
| | | | | TTCTTTGTCGGAACTACCCTTCACGGCGGCGTGGCCCGCGTGCTGGTACGACACGTCGTCCACCTCCAAA | |
| | | | | ACGGTGGCTTCCAGCGCCGTTTGCAGCTTCGACCGAATCCTGCTAGGCACGAGTAAATACATGAATATG | |
| | | | | TCTCTGAACTTTTTGAGCATTTTTAATNGTAATTAAGTCCTTAATCTTCAACAAATTTTTTAAACAAATTTC | |
| | | | | TCTAAGTTAGTTTACTACAGCTTGAAACTGCCATAAAAATAACAATATGTGGCNGTTTTACCAACTCCAA | |
| | | | | GACCCAATTACAAAAATTGTAAGAGATCTAAGAACCCAATTACAATTTATTTTTAATTTTTTTAGAAACTT | |
| | | | | CATTAAAAATTCCCAAATAATTCAATCACCTATTGATGTATTAACCCTCTAACTTATATTATTCTCTTACAA | |
| | | | | CCGTTTATAAAGTTTATCTAAACAGGACTTTACTTAGTTCCACCATTCAAAAAAACATGATTTTGTAGCTT | |
| | | | | ATGCATAAGTTCACTTCAACTTAT | |
| SY0574AQ | SY0574AF1 | GCGAGGA | | | 1104 |
| | | GGTCGTA | | | |
| | | GATGAGA | | | |
| SY0574AQ | SY0574AR1 | TGAAGGG | | | 1105 |
| | | TAGTTCC | | | |
| | | GACAAAG | | | |
| | | AAAC | | | |
| SY0574AQ | SY0574AA1FM | TGTCGTTT | A | | 1106 |
| | | GACAAGGC | | | |
| SY0574AQ | SY0574AA2TT | TCGTTTG | G | | 1107 |
| | | ACGAGGCT | | | |

### Example 5

### Allele Mining

[0623] We have performed allele mining in 428 diverse soybean accessions belonging to different maturity groups. As a result, nine haplotype groups were identified based on allelic variations in the coding sequences of Glyma16g30000 and Glyma16g30020 (Table 21). The large majority of genotypes analyzed (94.6%) carry a haplotype similar to Williams 82 (H5). Five accessions were found to carry the haplotype (H1) similar to Hikmok sorip, Plants from the entire set of accessions carrying haplotype H1 were found to accumulate high levels of Si (FIG. 18), thus confirming the association of haplotype H1 with high Si uptake capacity in soybean.

TABLE 21
Details of haplotype groups based on non-synonymous SNPs identified in
coding sequences of Glyma16g30000 and Glyma16g30020 genes evaluated
in 428 soybean accessions belonging to different maturity groups

| | | Glyma16g30000 | | Glyma16g30020 | | | | |
|---|---|---|---|---|---|---|---|---|
| Haplo- | Representative | SEQ ID NO. 16 | | SEQ ID NO. 14 | | | | Total |
| group | PI/cultivar | 33673022 | 33673483 | 33681630 | 33682500 | 33683047 | 33683049 | Lines |
| H5 | Williams 82 | T | A | T | C | C | T | 405 |
| H1 | Hikmok sorip | A | G | C | T | G | C | 6 |
| H2 | PI 567731 | A | G | C | C | C | T | 1 |
| H3 | PI 602991 | A | G | C | C | G | C | 3 |
| H4 | PI 553047 | T | A | C | C | G | C | 3 |
| H6 | PI 548644 | T | G | C | C | C | T | 4 |
| H7 | PI 468916 | T | G | C | C | G | C | 2 |
| H8 | PI 572239 | T | G | T | C | C | T | 3 |
| H9 | PI 407184 | T | G | T | C | G | C | 1 |

Bold - Hikmok sorip type allele,
Italics - Non-synonyrnous SNP

[0624] The evaluation of lines belonging to H2 to H9 haplotypes showed low level of Si accumulation compared to the average of Hikmok sorip with other PI lines from Haplotype H1 (FIG. 18),

### Example 6

### Sequence and 3-D Structure of HISil Gene

[0625] Si uptake in soybean is facilitated through influx in root by aquaporins GmNIP2-1 and GmNIP2-2 and subsequent efflux toward the aerial part by HiSil. No genetic variation has been observed for GmNIP2-1 and GmNIP2-2 genes. We have shown that the high Si uptake in Hikmok sorip and five other accessions carrying haplotype H1 is directly and uniquely related to the genetic variation at the HiSil locus. The HiSil gene (SEQ ID NO. 14 or 16) codes for a transmembrane protein having specific protein structure comprised with several transmembrane domains (FIG. 19).

### Example 7

### Sequence Homology to Other Monocots and Dicots

[0626] The HiSil protein sequence (SEQ ID NO. 15 or 17) has 57% homology with the low Si transporter 2 (Lsi2, efflux Si transporter) identified in rice (rice being a monocot) (FIG. 20). When looking at HiSil homologs in dicots (like soya), we see around 70% homology. Therefore, the present invention encompasses plants comprising a HiSil protein sequence having greater than 60% homology in monocots and greater than 70% homology in dicots.

### Example 8

### Increased Resistance

### Materials and Method

[0627] Overview of Procedure: Watering with AgSiI21 was begun at least one week (7 days) prior to inoculation of soybean with any pest or pathogen. 100× (10,000 ppm) stock solutions of AgSil 21 (CA5684A) was prepared and stored in 1-liter batches. In preparation for application to plants, each 100× stock solution was diluted 100-fold (10 mL 100× stock per liter of onsite water), and pH-adjusted to fall between 6.0 to 7.9 by adding a small portion of concentrated acid (3M HCl: CAS #7647-01-0). 100 ppm (1×) solution was applied to plants within each of the 2 treatments, using a dedicated watering can for each treatment. The 1× diluted solutions was applied each time irrigation was needed. The control was onsite-water and pH of the onsite water was checked to ensure that it fell within the same range as the AgSil21 watering solution.

[0628] The experiment was designed as a factorial with split-split plot, where the main plots were the soil amendment (watering regime) and sub-plots were soybean lines, such that soybean lines were randomized within each replicate. Planting was carried out with sterile soilless growing medium (Sun Metro Mix 900) at 8 pats/replications per treatment and 5 seeds per 12-oz. cup were planted around the perimeter and seedlings were covered with W of medium. One susceptible soybean seed (Corsoy 79) was planted in the middle of each pot.

[0629] Seeds were started in vermiculite, then just after emergence (3-5 days), they were gently uprooted and the root of each seedling was dipped into Cadaphora gregata spores suspended in solution at rate of approx. 10×10⁶ propagules per ml. In each cup, one plant was left non-inoculated for comparison. Plants were maintained at 70° F. and 14 hours of light.

8A—Evaluation of Soybean (Glycine max) Recombinant Inbred Lines (RIL) with and without Silicon Soil Amendment to Determine Resistance to Brown Stem Rot “BSR” (Cadaphora gregata)

[0630] The objective of this study was to evaluate 20 soybean lines, 2 parental lines, plus 7 additional controls (Table 22), with and without a Si soil amendment, to determine resistance to Brown Stem Rot (BSR) under greenhouse conditions. These lines of soybean have an ability to take up higher levels of silicon, and in combination with a silicon soil amendment, have demonstrated resistance to brown stem rot.

TABLE 22
List of soybean lines

| Table 22. | | |
|---|---|---|
| Material Id | Name | Characteristics/trait |
| 14DL880001 | Majesta | Parental line, Low silicon |
| | | accumulator, LoSil allele |
| 14DL880006 | RIL006 | High silicon accumulator, HiSil allele |
| 14DL880016 | RIL016 | Low silicon accumulator, LoSil allele |
| 14DL880017 | RIL017 | High silicon accumulator, HiSil allele |
| 14DL880019 | RIL019 | Low silicon accumulator, LoSil allele |
| 14DL880023 | RIL023 | Low silicon accumulator, LoSil allele |
| 14DL880046 | RIL046 | High silicon accumulator, HiSil allele |
| 14DL880047 | RIL047 | Low silicon accumulator, LoSil allele |
| 14DL880049 | RIL049 | Low silicon accumulator, LoSil allele |
| 14DL880052 | RIL052 | High silicon accumulator, HiSil allele |
| 14DL880057 | RIL057 | Low silicon accumulator, LoSil allele |
| 14DL880062 | RIL062 | High silicon accumulator, HiSil allele |
| 14DL880066 | RIL066 | High silicon accumulator, HiSil allele |
| 14DL880070 | RIL070 | High silicon accumulator, HiSil allele |
| 14DL880074 | RIL074 | Low silicon accumulator, LoSil allele |
| 14DL880080 | RIL080 | Low silicon accumulator, LoSil allele |
| 14DL880096 | RIL096 | Low silicon accumulator, LoSil allele |
| 14DL880109 | RIL109 | Low silicon accumulator, LoSil allele |
| 14DL880110 | RIL110 | High silicon accumulator, HiSil allele |
| 14DL880127 | RIL127 | High silicon accumulator, HiSil allele |

[0631] Evaluation was carried out at approx. 35 days post-inoculation where leaf and external stem disease symptoms were evaluated on each plant in each pot, by assessing the percent infected tissue, from 0 to 100%. In addition to foliar symptoms, each plant stem was split and the browning of the vascular tissue due to the fungus was measured and quantified (FIG. 21). Scalpels were used to split each stem and the full height of each stem was recorded (mm) as well and the length of vascular tissue which has turned brown due to the fungus.

[0632] Samples of leaves were taken once during each trial. At the end of the trial the first full trifoliate leaf sample was taken. The whole trifoliate leaf was harvested from the first full trifoliate of each plant. Leaf samples were placed into a pollinating bag and labeled. Leaves originating from plants in the same pot were placed into the same pollinating bag. Samples were air-dried until completely dry, crispy.

[0633] Photographs were taken for each entry per watering regime, if there were any visible differences in plant appearance or growth. Photographs were also taken of: general symptomology, assay layout, and methodology used (FIG. 22).

### Statistical Analysis of the BSR Greenhouse Experiment

[0634] The design of the experiment was such that all control replicates were concentrated on the left side of the greenhouse, and all treated replicates were concentrated on the right side of the greenhouse. Therefore, control and treated replicates were not randomized across the greenhouse. The design of the experiment did not allow the joint analysis of data from both treated and control groups. Hence, separate analysis of the data belonging to each group was performed. The analysis also discarded data from the lines named “Corsoy 79Nonlnoc A” and “Corsoy 79Nonlnoc B” because they did not get the same inoculation treatment as all other lines.

### Exploratory Analysis

[0635] Histograms of the trait % BSR within each group show distributions that are highly skewed to the left and with large numbers of zero. There are 48 observations in the histogram of the control group (FIG. 23A) for which % BSR equals to zero, and there are 26 observations in the histogram of the treated group (FIG. 23B) for which % BSR equals to zero. The mean and the standard deviation of % BSR in the control group were respectively 20.15% and 21.28%. The mean and the standard deviation of % BSR in the treated group were respectively 28.54% and 25.88%, and the total number of observations in both histograms is 240. For the control group, the average of % BSR across all lines with low Si accumulation (“Low”) is 22.33% and the average of % BSR across all lines with high Si accumulation (“High”) is 14.95%. For the treated group, the average of % BSR across all lines with “Low” is 32.90% and the average of % BSR across all lines with “High” is 22.94%.

### Model Fit

[0636] We used generalized linear models for our parametric analyses because data of the trait % BSR is not normally distributed (as shown in histograms of FIG. 23), Thus, we assumed exponential distributions for % BSR in each group with reciprocal canonical link functions. We fitted the following model within each group:

% BSR=mean+Plant Height+MATID+REP+error

[0637] We included Plant Height as a covariate in the model to factor out a possible linear relationship between % BSR and Plant Height.

[0638] Subsequently to model fitting, we used contrasts to test the hypothesis:
[0639] Ho: mean of MATID_{low}=mean of MATID_{High}
[0640] Ha: mean of MATID_{low}≠mean of MATID_{High}

### Results: Control (Water) Group

[0641] The analysis of the data belonging to the control group showed a highly significant effect of MATID (p-value<0.0001) and a 10% significance level for the REP effect (p-value=0.1007). The test for differences in % BSR between lines with “Low” and “High” Si showed a significant difference estimated as 42.97% (low-high) with p-value=0,03, i.e. we rejected the null hypothesis of no differences between % BSR of lines with “Low” and % BSR of lines with “High” at 3% significance level.

### Results: Treated (SI) Group

[0642] The analysis of the data belonging to the treated group showed a highly significant effects for both MATID and REP (both p-values<0.0001). The test for differences in % BSR between lines with “Low” and “High” Si accumulation showed a significant difference estimated as 63.21% (“Low”-“High”) with p-value=0.02, i.e. we rejected the null hypothesis of no differences between % BSR of lines with “Low” and % BSR of lines with “High” at 2% significance level.

### Conclusion

[0643] As per FIG. 24, lines with “High” Si accumulation showed significant less BSR damage than lines with “Low” Si accumulation, i.e. lines with “Low” showed around 43% more damage than lines with “High” within the control group, and lines with “Low” showed around 63% more damage than lines with “High” within the treated group.

[0644] There is evidence that the treated group had more pressure than the control group, i.e. The overall % BSR mean of the treated group was around 29%, whereas the overall mean of % BSR in the control group was around 20%. Also, the number of lines of zero % BSR damage was lower in the treated group (26) than in the control group (48). This could explain the larger difference in % BSR between “low” and “high” in the treated group than in the control group.

8B—Evaluation of Soybean (Glycine max) Recombinant Inbred Lines (RIL) with and without Silicon Soil Amendment to Determine Resistance to Soybean Cyst Nematode “SCN” (Heterodera glycines—Races 3)

[0645] The objective of this study was to evaluate 20 soybean lines (Table 22), with and without Silicon soil amendment, to determine resistance to Soybean Cyst Nematode “SON” under greenhouse conditions.

### Materials & Method

[0646] Overview of Procedure: Watering with AgSil21 was begun at least one week (7 days) prior to inoculation of soybean with any pest or pathogen. 100× (10,000 ppm) stock solutions of AgSil 21 (CA5684A) was prepared and stored in 1-liter batches. In preparation for application to plants, each 100× stock solution was diluted 100-fold (10 mL 100× stock per liter of onsite water), and pH-adjusted to fall between 6.0 to 7.9 by adding a small portion of concentrated acid (3M HCl: CAS #7647-01-0). 100 ppm (1×) solution was applied to plants within each of the 2 treatments, using a dedicated watering can for each treatment. The 1× diluted solutions was applied each time irrigation was needed. The control was onsite-water and pH of the onsite water was checked to ensure that it fell within the same range as the AgSil21 watering solution.

[0647] The experiment was designed as a factorial with split-split plot, where the main plots were the soil amendment (watering regime) and sub-plots were soybean lines, such that soybean lines were randomized within each replicate. Planting was carried out in 8 pots/replications per treatment. Two seeds were planted per pot, or seeds were pre-germinated and young seedlings were transplanted soon after germination. One seedling per pot was thinned after seeds for all treatments had germinated (approx. 5 days post-planting). Approx. 7 days after planting, SON were inoculated onto each treatment at an approximate rate of 2,000 eggs per pot.

[0648] Approximately one month after inoculation of SCN onto plants, the test plants were taken down for evaluation, and cysts removed from roots via washing over sieve screens to collect cysts. The number of cysts was evaluated by visually by counting under microscope.

[0649] Samples of leaves were taken once during each trial. The leaf samples were harvested just before the end of the trial. At this time the whole trifoliate was sampled from the first full trifoliate.

[0650] Photographs were taken for each entry per watering regime, if there were any visible differences in plant appearance or growth. Photographs were also taken of: general symptomology, assay layout, and methodology used (FIG. 25).

### Statistical Analysis of the SON Greenhouse Experiment

[0651] The design of the experiment was such that all control reps were concentrated on one bench of the greenhouse, and all treated reps were concentrated on a different bench. Therefore, control and treated reps were not randomized across the 2 benches used for the experiment and the design of the experiment does not allow the joint analysis of data from both treated and control groups. Hence, we performed separate analysis of the data belonging to each group.

### Exploratory Analysis

[0652] Histograms of the SON cyst counts within each group (control and Si treated; FIGS. 26) show left skewed distributions. There are 17 observations in the histogram of the control group for which Cyst Counts equals to zero, and there are 16 observations in the histogram of the treated group for which Cyst Counts equals to zero. The mean and the standard deviation of Cyst Counts in the control group were respectively 135.3 and 95.4 for 218 observations (FIG. 26A). The mean and the standard deviation of Cyst Counts in the treated group were respectively 119.0 and 93, for 221 observations (FIG. 26B). For the control group, the average of Cyst Counts across all lines with “Low” is 166.8 (sd =83.8) and the average of Cyst Counts across all lines with “High” is 142.2 (sd=83.2). For the treated group the average of Cyst Counts across all lines with “Low” is 158.6 (sd=87.6) and the average of Cyst Counts across all lines with “High” is 124.2 (sd=80) (now shown).

### Model Fit

[0653] We used generalized linear models for our parametric analyses because data of the trait Cyst Counts is a discrete variable (as shown in histograms of FIG. 26) that could fit the requirements of a Poisson distribution with overdispersion of the variance. Thus, we assumed for our model fitting Poisson distributions for Cyst Counts in each group with log link functions and overdispersion. We fitted the following model within each group:

Cyst Counts=mean+MATID+Plate+error

[0654] We considered Plate as an incomplete block factor. Subsequently to model fitting, we used contrasts to test the hypothesis:
[0655] Ho: mean of MATIDlow=mean of MATIDHigh
[0656] Ha: mean of MATIDlow≠mean of MATIDHigh
   Results : Control (water) Group

[0657] The analysis of the data belonging to the control group showed a highly significant effect of MATID (p-value<0.0001) and Plate effect (p-value=0.0065). The test for differences in Cyst Counts between lines with “Low” and “High” showed a significant difference (low-high) with p-value=0.05, i.e. we rejected the null hypothesis of no differences between Cyst Counts observed in lines with “Low” and Cyst Counts observed in lines with “High” at 5% significance level. However, the difference in Cyst Counts observed in lines with Low and Hi is no longer statistically significant if we do not include parental lines in our contrasts, i.e. “Low” (Majesta) in the low Si accumulator group and “High” (Hikmok) in the high Si accumulator group.

### Results: Treated (Si) Group

[0658] The analysis of the data belonging to the treated group showed a highly significant effects for both MATID and Plate effect (both p-values<0.0001). The test for differences in Cyst Counts between lines with “Low” and “High” showed a significant difference (low-high) with p-value=0.01, i.e. we rejected the null hypothesis of no differences between Cyst Counts observed in lines with “Low” and Cyst Counts observed in lines with “High” at 1% significance level. The difference in Cyst Counts between “Low” and “High” is still statistically significant (p-value=0.02) when we did not include the parental lines in our contrasts.

### Conclusions

[0659] Lines with “High” showed significantly less Cyst Counts than lines with “Low”. The Si treated group showed stronger (more consistent) results than the control group as the lines with “High” showed consistently less Cyst Counts than lines with “Low” independently of including parental lines in the contrast analysis.

8C—Evaluation of Soybean (Glycine max) Recombinant Inbred Lines (RIL) with and without Silicon Soil Amendment to Determine Resistance to Root-Knot Nematode “RKN”Meloidogyne incognita

[0660] The objective of this study was to evaluate 20 soybean lines (see Table 22), with and without Silicon soil amendment, to determine resistance to Root-knot nematode “RKN” under greenhouse conditions.

### Materials & Method

[0661] Overview of Procedure: Watering with AgSil21 was begun at least one week (7 days) prior to inoculation of soybean with any pest or pathogen. 100× (10,000 ppm) stock solutions of AgSil 21 (CA5684A) was prepared and stored in 1-liter batches. In preparation for application to plants, each 100X stock solution was diluted 100-fold (10 mL. 100× stock per liter of onsite water), and pH-adjusted to fall between 6.0 to 7.9 by adding a small portion of concentrated acid (3M HCl: CAS #7647-01-0). 100 ppm (1×) solution was applied to plants within each of the 2 treatments, using a dedicated watering can for each treatment. The 1× diluted solutions was applied each time irrigation was needed. The control was onsite-water and pH of the onsite water was checked to ensure that it fell within the same range as the AgSil21 watering solution.

[0662] The experiment was designed as a factorial with split-split plot, where the main plots were the soil amendment (watering regime) and sub-plots were soybean lines. Planting was carried out with sterile potting media at 4 pots/replications per treatment and 2 seeds per pot. Alternatively, seeds were pre-germinated and young seedlings were transplanted soon after germination. After seeds for all treatments have germinated (approx. 5 days post-planting) the plants was thinned to one seedling per pot. RKN was inoculated onto each treatment at an approximate rate of 2500 to 3000 eggs per pot. This was done approx. 7 days after planting.

[0663] Evaluation was carried out at approximately 45 days after inoculation of RKN onto plants, when the test plants were taken down. The roots were assessed using a rating system to look at the percentage of galled roots (not the number of galls).

[0664] Photographs were taken for each entry per watering regime, if there were any visible differences in plant appearance or growth. Photographs were also taken of: general symptomology, assay layout, and methodology used (FIG. 27).

### Statistical Analysis of the RKN Greenhouse Experiment

[0665] There was no actual replication in the RKN experiment because the same arrangement of lines within a replication was repeated throughout all reps. Therefore we cannot make statistical inferences through a test of hypothesis (give p-values etc.). Hence, we performed an exploratory analysis in which we obtained statistical summaries, boxplots and show trends of the data.

### Exploratory Analysis

[0666] Histograms of RKN damage rates (FIG. 28) show distributions with a long right tail in both treated and untreated groups. The untreated group show slightly larger mean/median (3.43/4) (FIG. 28B) than the treated group (3.2/2) (FIG. 28A). FIG. 29 shows histograms of RKN damage without the checks. We can observe in FIG. 29 that the long tails observed in FIGS. 28 are mostly due to ratings of checks. Without data from the checks, the untreated group still shows slightly larger mean/median (2.63/3) (FIG. 29B) than the treated group (2.42/2) (FIG. 29A). It's important to notice that all checks were placed in neighboring cones at the border of every replicate. We obtained rate means over 4 reps for each line (see excel file with statistical summaries). Barplots of FIGS. 30 and 31 show rates means (over 4 reps) versus MATID, which are arranged according to “High” and “Low” subgroups.

[0667] Boxplots of FIG. 32 show a possible difference between rates means of the subgroups “High” and “Low”, i.e. the overall mean of the subgroup Low (2.71 for the treated group and 2.94 for the untreated group) is larger than the overall mean of the subgroup High (2.24 for the treated group and 2.39 for the untreated group).

8D—RILs Carrying HiSil have Better Resistance to Phytophthora sojae

[0668] RILs carrying (or not) the HiSil allele from Hikmok sorip were tested for resistance against P. sojae under hydroponic conditions. A set of four RILs each with and without HiSil were grown in a greenhouse along with the parental lines Hikmok sorip and Majesta.

[0669] For the evaluation of the effect of Si on Phytophthora root rot (PRR), two independent experiments were performed. First experiments conducted with P. sojae race-25 showed that Si treatment increased survival rate of P. sofa-infected soybean plants by more than twice (FIG. 33a). The increase in survival rate was higher in HiSil RILs compared to LoSil RILs (FIG. 33b). Similarly, plant dry weight and height were higher in Si-treated plants (FIG. 33c, d). These experiments highlighted the prophylactic effect of Si against PRR and supported the hypothesis that the beneficial effects were more prominent in plants carrying the HiSil allele.

[0670] The second experiment was conducted using a cocktail of P. sojae races. For this purpose, the five most virulent races, including 4, 7, 13, 17 and 25, were used to inoculate HiSil and LoSil RILs. Even under this high disease pressure, significantly higher survival rate and root and shoot dry weight were observed following Si treatment (FIG. 34a). For all the measured variables, the gains were significantly higher in HiSil than in LoSil plants (FIG. 34b, c, d)). In conclusion, Si provided horizontal resistance against PRR covering a broad range of P. sojae races and this resistance was more manifest in HiSil plants.

8E—RILs Carrying HiSil have Better Drought Tolerance

[0671] RILs carrying HiSil allele from Hikmok sorip were tested for drought tolerance under Si fertilization. A set of four RILs each with and without HiSil allele were grown in a greenhouse along with parental lines Hikmok sorip and Majesta. Leaf wilting score of soybean plants grown under hydroponic conditions for three weeks and then subjected to water stress by cutting off water supply was recorded. Wilting scale used is—1 for no wilting, 2 very slight wilting, 3 wilting, 4 high wilting, 5 dying, and 6 is for dead. A significantly lower level of wilting was observed as a result of Si fertilization. This difference was more pronounced in RILs carrying HiSil allele than in RILs without it (FIG. 35).

### Methods

[0672] A grafting experiment was conducted to create a situation where the aerial part of the plants had exactly the same genetic background but with differential Si uptake capability from two different rootstocks. This provided a sensible alternative over isogenic lines typically required for the evaluation of allelic effect of a gene. Grafting of soybean plants was performed on one-week-old seedlings grown in Oasis cubes. A cleft grafting approach was used to make the grafts. Shoots were cut at right angle below the cotyledons. The rootstock was then split down at the center at a one-inch depth. The scion was chopped from both sides to form a pointed tip as shown in FIG. 36. Then the scion was inserted into the rootstock split and the union was wrapped with parafilm tape.

[0673] The grafted plants were maintained at high humidity under plastic dome for three days before transplanting into a hydroponic system. A total of 20 plants were transplanted into each plastic tunnel. Plants were supplied with a nutrient solution amended with or without Si (1.7 mM). Water stress was imposed three weeks after transplanting by withdrawing water from the tunnels. The leaf wilting symptoms were scored with a wilting scale where: −0—no wilting; 1—very slight wilting; 2—slight wilting; 3—wilting; 4—high; 5—dying, and 6—dead.

### Results

[0674] Hikmok plants were the most susceptible to water stress in absence of Si amendment. However, in presence of Si, the wilting symptoms were drastically reduced.

[0675] The same phenomenon was observed with Majesta scions grafted on Hikmok roots. By contrast, Majesta plants did not benefit from Si amendments, Finally, a reduction in drought stress was observed with Hikmok scions grafted on Majesta rootstocks (FIG. 37).

### Example 9

### Evaluation of Effect of Glyma16g30000 and Glymal6g30020 in Transgenic Arabidopsis

### Methods

### Plant Material and Growth Conditions

[0676] Four different Arabidopsis genotypes [Colombia (Col-0; Ohio State University), TaLsi1 lines (Montpetit et al., 2012), TaLsi1 Hisila and TaLsil Hisilb lines] were used in the present work. For all experiments, seeds were surface-sterilized (5% bleach, 2 min), rinsed five times with water and stored at 4° C. for 3 days to break dormancy. Col-0 seeds were directly sown on Veranda® Container Mix (Fafard et freres) in a growth chamber under long-day conditions (14 h of light at 22° C., 10 h of dark at 19° C., 55-65% humidity and a light intensity of 150 μmol/m2/s) and covered with plastic sheets for one week. TaLsi1 lines and T2 TaLsil HiSil lines were selected on Murashige and Skoog Basal Medium with Gamborg's Vitamins (MS) (Sigma-Aldrich) containing hygromycin (15 mg/L) for TaLsil lines and kanamycin (50 μg/ml) for TaLsi1 HiSil lines. At day 10, seedlings of uniform size were transferred to pots containing Veranda® Container Mix at a density of five plants per pot. Plants were treated with water containing 1.7 mM Si in the form of K₂SiO₃. Only controls (Col-0 and TaLsi1 lines) received a treatment without soluble Si, in which potassium chloride was used to replenish potassium. Plants were maintained in a growth chamber as described above. Arabidopsis plants of different genotypes were used for experiments one month after transplanting.

### Isolation of Promoter Region, Construction of Promoters: GUS Reporters and Plant Transformation

[0677] The 2.5 kb region upstream of the initiation codon of N1P5;1 gene (AT4G10380) was amplified from a BAC clone. The 290 bp region upstream of the initiation codon of CASP2 gene (AT3G11550) was amplified by PCR from genomic DNA extracted from Col-0 Arabidopsis plants using high fidelity polymerase (Phusion®, New England BioLabs). Primers were designed to amplify promoters and to introduce Smal and HindlIl or Sbfl restriction sites (see Table 1). PCR products were cloned in pGEM®-T easy using Takara ligation kit (Takara). Promoters were then cloned in TOP 10 E. coli cells and clones were screened for presence of insert with colony PCR. Next, plasmids were recovered from a fresh bacterial culture using the QIAprep Spin Miniprep kit (Qiagen). Finally, 1 μg of pure plasmid DNA was digested with restriction enzymes followed by confirmation of the amplicons by DNA sequencing,

[0678] Promoters were inserted into the plasmid pB1121 (Clontech), a binary vector harbouring a GUS reporter gene. Insertion was into the SmaI and HindIII or Sbfl sites in order to replace the CaMV 35s promoter and ligation was assessed using Takara ligation kit (Takara). Cloning in TOP10 E. coli cells for multiplication was made prior to cloning in Agrobacterium tumefaciens strain GV3101 for plant transformation.

[0679] Col-0 Arabidopsis plants were transformed by a modified floral dip method (Zhang et al., 2006). Independent transgenic lines (T1) were selected for Kanamycin resistance (50 μg/ml) on MS medium (Sigma-Aldrich) and the presence of the regulatory regions was verified by PCR (see Table 1). T2 transgenic seeds were harvested and sown on MS medium containing Kanamycin (50 μg/ml) for 10 days and transferred into Magenta box for growth. T2 transgenic plants were used for phenotypical analyses.

### Histochemical GUS Staining

[0680] The Gus-assays were performed on 3 weeks old transgenic Arabidopsis plants. For histochemical localisation of β-glucuronidase (GUS) activity, β-glucuronidase reporter gene staining kit (Sigma) was used according to the manufacturers instructions. Incubation was in the dark at 37° C. overnight and tissues were washed twice with ethanol 100% until the chlorophyll pigments were completely bleached. Whole plants were observed directly under binocular and light microscopes.

### Construction of Plant Expression Vectors and Plant Transformation

[0681] The two HiSil soybean candidate genes, Glyma16g30000 (Hisila) and Glyma16g30020 (Hisilb), genes were amplified from Hikmok sorip and Williams, and verified for sequences correctness. All four alleles (alleles Williams and Hikmok from both genes) were synthesized (Genscript) in pUC57 with Smal and Sac' sites to ensure sequence accuracy. Col-0 and TaLsil line were used to express Hisila and Hisilb. Conventional molecular cloning techniques were applied to construct the plant expression vectors. Binary vector pB1121 containing either NIP5;1 or CASP2 promoter was digested with SmaI and SacI in order to remove the GUS reporter gene. All synthesized alleles were also digested with Smal and Sacl. Ligation of four different alleles in the vector containing one of two promoters for a total of 8 different constructs was made using Takara ligation kit (Takara). Constructs were cloned in TOP 10 E. coli cells and clones were screened for presence of insert with colony PCR. Next, plasmids were recovered from a fresh bacterial culture using the QIAprep Spin Miniprep kit (Qiagen). Pure plasmid DNA was digested with restriction enzymes and minipreps were sent for sequencing for confirmation. One positive clone for each construct was cloned in Agrobacterium strain GV3101 using a modified freeze-thaw method (Jyothishwaran et al., 2007) and after validation with colony PCR, one clone per construct was selected for plant transformation. A. thaliana was transformed according to a modified floral dip method (Zhang et al., 2006). Independent T1 transgenic lines were selected on the MS medium (Sigma-Aldrich) containing Kanamycin (50 μg/ml), and the presence of the HiSil transgene was verified by polymerase chain reaction (PCR) (see table 1). T2 seeds were harvested from independent transgenic lines bearing each construct, respectively, and sown on MS medium containing Kanamycin (50 μg/ml). For all experiments, the phenotype of the T2 transgenic plants was analyzed.

### Determination of Si Concentration in Transgenic Arabidopsis Shoots

[0682] Transgenic lines TaLsil, TaLsi1 HiSil and Col-0 plants treated or not with Si were analysed in this study. The Si content in experimental plants was measured by colorimetric analysis following an HCL-HF extraction (Taber et al., 2002). Aerial parts of the plants from each treatment (5 plants per line) were collected and freeze-dried one month after the beginning of Si amendment. Samples were ground to a powder before Si analysis. For each treatment a minimum of five biological replicates were used.

### Statistical Analyses

[0683] Statistical significance was assessed with Student's t-test and Dunnett's test using JMP 12 software (SAS institute Inc.). Least square means were used to express the results. Standard error was used as the error bar in figures.

### Results

### Validation of HiSil Activity in a Transgenic Arabidopsis

[0684] Arabidopsis transformation with alternative alleles for both candidate genes Glyma16g30020 and Glyma16g30000 was performed to validate HiSil activity. To achieve constitutive expression in root tissues, constructs were made with two promoters NIP5;1 and CASP2. Constructs with both promoters showed expression of GUS in the root tissue (FIG. 38a). A total of 8 different constructs representing two promoters, and two alleles representing Williams and Hikmok sequences were prepared. Evaluation of transgenic Arabidopsis lines showed a significantly higher Si accumulation for Hikmok allele compared to Williams allele of Glyma16g30020 (FIG. 38b).

TABLE 23
List of primers used in this study.

| | | SEQ |
|---|---|---|
| Table 23 | | ID |
| Name | Sequence 5′-3′ | NO. |
| ATPRO 11550 fwd | GAC CTG CAG GCA CCT TTA | 616 |
| | CCT ATT TCA TAA TAT AAT TAT C | |
| ATPRO 11550 rev | GAG ACC CGG GGG ATG CTT | 617 |
| | TGG TGG TGA ATG AG | |
| HINDIII-PNIP5 fwd | GAG AAA GCT TGA AAG CAA | 618 |
| | GCA TTC CCT G | |
| SMAI-PNIP5 rev | GAG ACC CGG GCA ACG TTT | 619 |
| | TTT TTT TTG GT | |
| Hyg R JAW fwd | ATG TAG GAG GGC GTG GAT | 620 |
| | ATG T | |
| Hyg R JAW rev | TGC CGT CAA CCA AGC TCT GA | 621 |
| 30000 fwd | TGT GCC TTT TCT ACC CAT TG | 622 |
| 30000 rev | GAT TTC CAC AGT ACC CTC T | 623 |
| HiSil fwd 2 | GGA GTT GTG GTG AAT GTT G | 624 |
| Hisil rev 2 | GGG TTT TCC CAG TCA CGA | 625 |
| ATPRO fwd2 | GTG AGA CCC AAT GAA AGA C | 626 |
| Atpro REV2 | TAA GGT GGG AGG TTA TGT TG | 627 |
| Gamma fwd | TAT ACC CGG GAT GGC ATT | 628 |
| | GGC TCC TAC TCC | |
| Gamma rev | GCG CGA GCT CTC ATT TTA | 629 |
| | TGA GTG TCA ACC | |

### Example 10

### Transgenic Soybean Expressing the HiSil Gene (30020) Under Control by its Native Promoter/Terminator Sequences

### Methods.

[0685] Wlliams82 soybean plants were transformed with the HiSil allele (SEQ ID NO. 14) composed of the native promoter (SEQ ID NO. 20) and native terminator regions.

[0686] T1-generation seeds from 10 independent events were sown in germination soil and segregation was determined by zygosity using the Taqman® gene expression assay.

[0687] Once segregated, homozygous and null siblings were watered with 1.77 mM AgSil (˜pH 7.5) beginning at the V2-stage (no NPK fertilizer was used) and single leaflets from the 1st and/or 2nd trifoliate were sampled at time 0 and at 10, 20 and 30 days post-silicon application. The leaves were then freeze-dried and shipped for analysis.

### Results

[0688] FIG. 39 shows that, on average (averaging all controls & all homozygous pools), plants expressing the HiSil gene (SEQ ID NO. 14) gave an average leaf accumulation of 1.5857 units of Si, whereas “Null” plants averaged 1.364 Si units.

### Conclusion

[0689] Plants from the homozygous pool showed an average of 16.22% accumulation of Si over null plants.

### Example 11

### Silicon Efflux Transport Activity of Glyma16g30020 Evaluated in Xenopus oocytes Assay

### Methods

[0690] Plasmid Construction for Heterologous Expression in Xenopus oocytes

[0691] Complete coding DNA sequence (CDS) for Glyma16g30020 was amplified with primers having extended sequence for Spel and BgIII endonuclease sites. The amplified CDS sequences representing both Hikmok soprip and Majesta alleles were digested with SpeI and BgIII endonucleases, Then, the digested CDS products were cloned into the pre-digested pT7TS vector, a Xenopus laevis oocyte expression vector derived from pGEM4Z, comprises the T7 and SPO promoters, 5′ & 3′ untranslated regions (UTRs) of Xenopus

[0692] Beta-globin gene and a poly(A) tract (Addgene plasmid #17091, www.addgene.org). All vectors were transformed into Escherichia coli TOP10 strain and stored at −80° C. The correctness of the constructs was confirmed by sequencing prior to in vitro translation.

Si Transport Assays Using Heterologous Expression in Xenopus oocytes

[0693] Plasmids containing the Glyma16g:30020 CDS were recovered from a fresh bacterial culture using a QIAprep Spin Miniprep kit (Qiagen). A total of five μg of each plasmid were linearized using SmaI (Roche, http://www.roche.com). Digested products were column-purified using a PCR purification kit (Qiagen), and 1 μg of DNA was transcribed in vitro using the mMessage mMachine T7 Ultra kit (Ambion, www.invitrogen.com/site/us/en/home/brands/ambion.html). Complementary RNAs (cRNAs) were purified using phenol/chloroform precipitation, and suspended in water treated with 0.1% DEPC (Sigma-Aldrich, www.sigmaaldrich.com/). Defolliculated stage V-VI oocytes were injected with 25 nl of 8.5 nM Si solution (control), or with 25 nl of 500 ng/μl cRNAs solubilized in a 8.5 nM final Si solution. A first pool of ten (10) oocytes for each treatment of injection were recovered (=T0), rinsed in sucrose-HEPES solution and frozen until Si intracellular measurement. Remaining eggs were maintained at 18° C. in modified Barth medium (MBS) (88 mM NaCl, 1 mM KCl, 2.4 mM NaHCO₃, 0.82 mM MgSO₄, 0.33 mM Ca(NO₃)2.4H₂O, 0.41 mM CaCl₂, 15 mM Hepes, pH 7,6) supplemented with 100 μM of penicillin/streptomycin. Seventy-two (72) hours after injection, a second pool of 10 oocytes for each treatment were recovered, rinsed in sucrose-HEPES solution and frozen until Si intracellular measurement.

Dosage of Si in Xenopus oocytes

[0694] Concentrated nitric acid (25 μl) was added to each pool of ten (10) oocytes, which were then dried for 2 h at 82° C. Plasma-grade water (100 μl) was added, and samples were incubated for 1 h at room temperature. Samples were vortexed, then centrifuged for 5 min at 13,000 g. The intracellular Si concentration was measured in 10 μl of supernatant by Zeeman atomic absorption using a Zeeman atomic spectrometer AA240Z (Varian; www.varian.com) equipped with a GTA120 Zeeman graphite tube atomizer. The standard curve was obtained using a 1,000 ppm ammonium hexafluorosilicate solution (Fisher Scientific, www.fishersci.com). Data were analyzed with SpectrA software (Varian).

### Results

[0695] Evaluation of Si transport activity in Xenopus oocytes showed efflux activity for Glyma16g:30020. Significantly higher Si efflux was observed for the Hikmok allele compared to Williams allele (FIG. 40). The Williams allele represents haplotype 5 (H5; see FIG. 18) the most frequent allele type observed in most soybean cultivars including Majesta.

[0696] After evaluation of several different constructs, FIG. 41 shows that both genes Glyma16g:30000 and Glyma16g:30020 are functional Si efflux transporters. Interestingly, the position corresponding to position 295 (isoleucine) of Glyma16g30020 (also SEQ ID NO: 15) may be a significant protein structure that enhances or decreases the functionality of the protein. For example, as shown in FIG. 41, HiSil 30020 Hikmok comprising a isoleucine at position 295 demonstrates a increase in Si efflux as opposed to LoSil 30020 not comprising said isoleucine at position 295. Further, when the HiSil 30020 Hikmok isoleucine (I) at position 295 was substituted with a Threonine (T) the protein unexpectedly functioned similar to the LoSil 30020 protein, thus indicating that position 295 may be a important amino acid for protein function (see “HiSil I295T” in FIG. 41). Furthermore, it is noted that there likewise was a enhancement of efflux function when the corresponding position (i.e. position 298) of Glyma16g30000 was changed from a T to I there was an increase in efflux activity (see FIG. 41).

### Example 12

### Elite Soybean Introgression

[0697] A donor line having in its genome the HiSil locus is crossed with a with a recipient line such as, for example, an elite soybean line selected from: AG00802, A0868, AG0902, A1923, AG2403, A2824, A3704, A4324, A5404, AG5903, AG6202 AG0934; AG1435; AG2031; AG2035; AG2433; AG2733; AG2933; AG3334; AG3832; AG4135; AG4632; AG4934; AG5831; AG6534; and AG7231 (Asgrow Seeds, Des Moines, Iowa, USA); BPR0144RR, BPR 4077NRR and BPR 4390NRR (Bio Plant Research, Camp Point, III., USA); DKB17-51 and DKB37-51 (DeKalb Genetics, DeKalb, Ill., USA); DP 4546 RR, and DP 7870 RR (Delta & Pine Land Company, Lubbock, Tex., USA); JG 03R501, JG 32R606C ADD and JG 55R503C (JGL Inc., Greencastle, Ind., USA); NKS 13-K2 (NK Division of Syngenta Seeds, Golden Valley, Minn., USA); 90M01, 91M30, 92M33, 93M11, 94M30, 95M30, 97B52, P008T22R2; PI6T17R2; P22T69R; P25T51R; P34T07R2; P35T58R; P39T67R; P47T36R; P46T21R; and P56T03R2 (Pioneer Hi-Bred International, Johnston, Iowa, USA); SG4771NRR and SG5161NRRISTS (Soygenetics, LLC, Lafayette, Ind., USA); S00-K5, S11-L2, 528-Y2, 543-B1, S53-A1, S76-L9, S78-G6, 50009-M2; S007-Y4; 504-D3; 514-A6; 520-T6; 521-M7; 526-P3; 528-N6; 530-V6; 535-C3; 536-Y6; S39-C4; S47-K5; 548-D9; 552-Y2; 558-Z4; 567-R6; S73-S8; and 578-G6 (Syngenta Seeds, Henderson, Ky., USA); Richer (Northstar Seed Ltd. Alberta, CA); 14RD62 (Stine Seed Co. Ia., USA); or Armor 4744 (Armor Seed, LLC, Ar., USA).

[0698] The seeds are then collected from the cross of step 1, and a progeny is grown up. The progeny is then selected for having the HiSil Locus using marker assisted breeding to identify markers/QTL associated with the trait, for example, such as markers corresponding to the ones listed in Tables 15-20.

[0699] One or more backcrosses are performed with the elite Glycine max. The plants are then selfed and the seeds collected. The plants from the seeds are then evaluated for the presence of HiSil loci (i.e. marker assisted breeding).

[0700] Elite Gmax Hisil plants are then grown and produced from the selected plants.

### Example 13

### Generation of Cisgenic Events Containing Genomic Fragment of HiSil Allele from Hikmok sorip Line

[0701] Jack soybean calli are transformed with a Hikmok sorip genomic fragment containing the HiSil allele (SEES ID NO: 630) composed of the native promoter, 5′-untranslated, coding region including introns and 3′-untranslated region. Since both of the 5′-(CGA) and 3′-(TCG) ends of the fragment contain half Nrul cleavage site (5′-TCGCGA-3′), 3 bases are added to both ends so the fragment is flanked by two Nrul sites during synthesis of primers to amplify the fragment for cloning. The GmHiSil genomic DNA sequence is amplified from Hikmok sorip soybean line using high fidelity DNA polymerase and cloned into pCR-TOPO vector, pCR-TOPO clones with PCR product insert are analyzed with DNA sequencing. A GmHiSil clone with no PCR-introduced mutation is named pCR-GmHiSil1aNrul (FIG. 42).

[0702] For soybean transformation, the whole Nrul fragment (6275 bps) containing the HiSil gene is released from the plasmid pCR-GmHiSillaNrul and purified using standard method such as preparative gel electrophoresis followed by electroelution. A separate DNA fragment comprising of a selectable marker gene (ALS or PMI) cassette is also prepared for co-delivery into the soybean callus tissues along with the HiSil fragment.

[0703] Transformation of soybean calli is done via physical delivery method, preferably biolistic bombardment [McCabe et al. (1988) Transformation of shoot meristems by particle acceleration. Bio/Technol 6:923-926; Finer and McMullen (1991) Transformation of soybean via particle bombardment of embryogenic suspension culture tissue. In Vitro Cell Dev Biol. 27P:175-182; Santarem and Finer (1999) Transformation of soybean [Glycine max(L) Merrill] using proliferative embryogenic tissue maintained on semi-solid medium. In Vitro Cellular & Developmental Biology—Plant 35:451-455.] Callus tissue is induced from immature embryos and used for particle bombardment. Transformed calli are selected on media containing selection agent, such as ALS inhibitor herbicide chlorsulfuron if acetolactate synthase (ALS) gene is used as selectable marker. Alternatively, mannose can be used as selection agent if phosphomannose isomerase (PMI) is used as marker. Selected transgenic calli are placed on regeneration media to form somatic embryos. Somatic embryos are then placed on maturation media and mature somatic embryos are then later desiccated and then germinated to from T0 transgenic plants. TO cisgenic/transgenic plants are assayed for the presence of GmHiSil gene insertion. Optimally, plants with low copy of GmHiSil and ALS or PMI marker gene insertion are selected to be grown to maturity. T0 plants are self-pollinated or backcrossed with other genotypes of soybean to produce progeny seeds. Progeny seeds are planted and individual plants are genotyped to select for lines that only contain a single copy of GmHiSil insertion, but with no ALS or PMI selectable marker transgene. The lines with only GmHiSil insert are “cisgenic” since they do not contain any foreign DNA sequences.

### Example 14

### Generation of Genome Edited Soybean Plants Containing Genotype of HiSil Allele of Hikmok sorip Line

[0704] The protein coding sequences of silicone transporter genes (GmLSi) of transformable lines Williams 82 and Jack are only 5 bases different from the Hikmok sorip sequence (GmHiiSil, SEQ ID NO: 630). Only 2 of them lead to change of amino acid sequence in the silicon transporter protein. Genome editing technologies can be used to convert the GmLSi gene in low silicon-accumulating lines such as Jack into high silicon-accumulating GmHiSil allele present in Hikmok sorip. Several types of programmable site-directed nucleases can be used to achieve such a purpose, including but not limited to zinc finger nuclease (ZEN), TAL effector nuclease (TALEN), engineered meganuclease (eMN), CRISPR-Cas9 and DNA-guided Argonaute system (Puchta and Fauser (2014) Synthetic nucleases for genome engineering in plants: prospects for a bright future. Plant Journal 78:727-741; Chen and Gao (2014) Targeted genome modification technologies and their applications in crop improvements. Plant Cell Rep. 33:575-583; Gao et al (2016) DNA-guided genome editing using the Natronobacterium gregoryi Argonaute. Nature Biotech. doi:10.1038/nbt.3547).

[0705] Here, we describe the use of one of the genome editing systems, CRISPR-Cas9 to mediate replacement of nucleotide sequence of GmLSi gene in soybean line Jack with GmHiSil allele from Hikmok sorip. CRISPR-Cas9 -mediated gene modification requires these components: Cas9 nuclease, crRNA (CRISPR RNA) recognizing the mutagenesis target, tracRNA (transactivating RNA) and repair donor DNA template molecule. For easiness of use, crRNA and tracRNA are usually fused and delivered as a single guide RNA molecule (gRNA or sgRNA) [Sander and Joung (2014) CRISPR-Cas systems for editing, regulating and targeting genomes. 32:347-355]. In order to achieve good expression in maize cells, Type II Cas9 gene from Streptococcus pyogenes SF370 is optimized with soybean-preferred codons. Nuclear localization signal is also incorporated into the C-terminus of Cas9 to improve its targeting to nucleus. To express Cas9 in soybean cells, the soybean-optimized Cas9 gene is placed under the control of a strong constitutive Arabidopsis Elongation Factor promoter (prAtEF1a) and followed by a NOS terminator sequences (tNOS) (FIG. 43).

[0706] In this example, a transformation vector pNIALS-GmCas9-HiSil (Figure Y-1) contains expression cassettes for selectable marker gene ALS, Cas9 and two sgRNAs (single guide RNAs). The two sgRNAs guide Cas9-medaited cleavage of Jack genomic sequences around the 2 target regions and generate dsDNA breaks. Two repair donor oligonucleotide sequences are co-delivered into the Jack soybean callus tissue to mediate replacement of the GmLSi target sequences with HiSil alleles of Hikmok sorip. Both donor oligonucleotides have one of the nucleotides corresponding to the PAM sequences (5′-NGG) mutated so the replaced allelic sequence will not get cleaved again by Cas9. More specifically, in Jack Target 1 (SEQ ID NO 631: 5′-ATGGC ATTGG CTCTT ACTCC AACAG TTGTC TTTGG-3′), the replaced allele is one nucleotide (underlined) different from Hikmok sorip sequences (SEQ D NO 632: 5′-ATGGC ATTGG CTCCT ACTCC AACAG TTGTC TTTGG-3′), but this difference is a silent mutation resulting in no amino acid sequence change. For this target, a sgRNA-T1 in pNtALS-GmCas9-HiSil (Figure Y-1) containing targeting sequence xGmHiSil-T1 (SEQ ID NO 633: 5′-TTTAA CCACA ACAAT GGCAT-3′) is used to guide Cas9 cleavage. For this target, a donor oligonucleotide of 74 bps (DON-HiSil-T1, SEQ ID NO 634: 5′-GTTTG GAAAT TGTTG CTTGT TTAAC CACAA CAATG GCATT CGCTC CTACT CCAAC AGTTG TCTTT GGCTC AATA-3′) is used to replace the Jack target sequence. For replacement of sequences in Jack Target 2 (SEQ ID NO 635: 5′-AATTT CAGCT ATATC AAGTG CCTTT TTCA -3′) has two bases different than the Hikmok sorip allele (SEQ ID NO 636: 5′-AATTT CTGCT ATATC AAGTG CTTTT TTCA -3′). For this target, a guide RNA sgRNA-T2 in pNtALS-GmCas9-HiSil (FIG. 43) containing targeting sequences xGrnHiSil-T2 (sgRNA-2, SEQ ID NO. 637: 5′-AGATG TGTCA TTGGT GAAAA -3′, targeting the coding strand) is used to guide Cas9 cleavage. For this target, a donor oligonucleotide of 83 bps (DON-HiSil-T2, SEQ ID NO 638: 5′-AAGGA CTTAC TCTGT AGAAT TTGTT TAATT TCTGC TATAT CAAGT GCTTT TTTCA CCAAT GACAC ATCTT GTGTT GTATT GAC -3′) is used to replace the Jack target sequence.

[0707] To generate allele replaced soybean lines, transformation vector pNtALS-GmCas9-HiSil (FIG. 43) is co-precipitated with two oligonucleotides (DON-HiSil-T1 and DON-HiSil-T2) onto gold particles and then co-delivered into Jack calli by biolistic bombardment. Bombed calli are selected with ALS herbicide such as chlorasulfuron and selected calli are regenerated into somatic embryos. Somatic embryos are germinated as described above for generating cisgenic plants. After germination, seedlings are sampled for molecular analysis to identify lines containing desirable mutations with Hikmok sorip-type allele. Identification of candidate mutants can be done using restriction digestion if suitable site can be found to distinguish WT than from mutant. Alternatively, highly sensitive SNP-assay or qPCR Taqman assay can be designed to identify desirable edited mutants. Identified potential mutations are typically confirmed by sequencing analysis of PCR products in these candidate mutant lines. It should be noted that other site-directed nucleases can be used to generate sequence-specific breaks to mediate sequence replacement. Also, other DNA, RNA or protein delivery method can be used to deliver components of the editing machinery and donor repair molecules to achieve editing of soybean transporter genes to make them more efficient in transporting silicon.

[0708] While the invention has been described in connection with specific embodiments thereof, it will be understood that it is capable of further modifications and this application is intended to cover any variations, uses, or adaptations of the invention following, in general, the principles of the invention and including such departures from the present disclosure as come within known or customary practice within the art to which the invention pertains and as may be applied to the essential features hereinbefore set forth, and as follows in the scope of the appended claims.

[0709] All patents, patent applications and publications mentioned in this specification are herein incorporated by reference to the same extent as if each independent patent, patent application or publication was specifically and individually indicated to be incorporated by reference.

### REFERENCES

[0710] Arsenault-Labrecque, G., Menzies, J. G., & Belanger, R. R. (2012). Effect of silicon absorption on soybean resistance to Phakopsora pachyrhizi in different cultivars. Plant Disease, 96(1), 37-42.
[0711] Belanger R R, Benhamou N, Menzies G, 2003. Cytological evidence of an active role of silicon in wheat resistance to powdery mildew (Blumeria gratninis f. sp, tritici). Phytopathology 93(4), 402-412.
[0712] Bowen P, Menzies J, Ehret D, et al., 1992. Soluble silicon sprays inhibit powdery mildew development on grape leaves. Journal of the American Society for Horticultural Science 117(6), 906-912.
[0713] Bradbury P J, Zhang Z, Kroon D E, et a., 2007. TASSEL: software for association mapping of complex traits in diverse samples. Bioinformatics 23(19), 2633-2635.
[0714] Chen W, Yao X, Cai K, Chen J, 2011. Silicon alleviates drought stress of rice plants by improving plant water status, photosynthesis and mineral nutrient absorption. Biological trace element research 142, 67-76.
[0715] Cingolani P, Platts A, Coon M, et al., 2012. A program for annotating and predicting the effects of single nucleotide polymorphisms, SnpEff: SNPs in the genome of Drosophila melanogaster strain w1118; iso-2; iso-3. Fly 6, 80-92.
[0716] Deshmukh R K, Vivancos J, Guérin V, et al., 2013. Identification and functional characterization of silicon transporters in soybean using comparative genomics of major intrinsic proteins in Arabidopsis and rice. Plant Molecular Biology 83, 303-15.
[0717] Elshire R J, Glaubitz J C, Sun Q, et al., 2011. A robust, simple genotyping-by-sequencing (GBS) approach for high diversity species. PLOS ONE 6, e19379.
[0718] Epstein E, 1994. The anomaly of silicon in plant biology. Proceedings of the National Academy of Sciences 91(1), 11-17.
[0719] Epstein E, 2009. Silicon: its manifold roles in plants. Annals of Applied Biology 155, 155-60.
[0720] Fawe A, Menzies J G, Cherif M, et al., 2001. Silicon and disease resistance in dicotyledons. Studies in Plant Science 8, 159-169.
[0721] Feng Z, Zhang B, Ding W, et al., 2013. Efficient genorne editing in plants using a CRISPR/Cas system. Cell research 23(10), 1229-1232.
[0722] Goodstein D M, Shu S, Howson R, et al., 2012. Phytozome: a comparative platform for green plant genomics. Nucleic Acids Research 40, D1178-D86.
[0723] Gu H-H, Qiu H, Tian T, etal., 2011. Mitigation effects of silicon rich amendments on heavy metal accumulation in rice (Oryza sativa L.) planted on multi-metal contaminated acidic soil. Chemosphere 83, 1234-40,
[0724] Guérin V, Lebreton A, Cogliati E E, et al., 2014. A zoospore inoculation method with Phytophthora sojae to assess the prophylactic role of silicon on soybean cultivars. Plant Disease, doi: dx.doi.org/10.1094/PDIS-01-14-0102-RE.
[0725] Hodson M, White P, Mead A, Broadley M, 2005. Phylogenetic variation in the silicon composition of plants. Annals of Botany 96, 1027-46.
[0726] Imsande J & Ralston E J, 1981, Hydroponic Growth and the Nondestructive Assay for Dinitrogen Fixation, Plant Physiol. 68, 1380-1384.
[0727] Joung J K & Sander J D, 2013. TALENs: a widely applicable technology for targeted genome editing. Nature Reviews Molecular Cell Biology 14(1), 49-55.
[0728] Kang H M, Zaitlen N A, Wade C M, et al., 2008. Efficient control of population structure in model organism association mapping. Genetics 178(3), 1709-1723.
[0729] Lipka A E, Tian F, Wang Q, etal., 2012. GAPIT: genome association and prediction integrated tool. Bioinformatics 28(18), 2397-2399.
[0730] Loiselle B A, Sork Nason J, etal., 1995. Spatial genetic structure of a tropical understory shrub, Psychotria officinalis (Rubiaceae). American Journal of Botany 1420-1425.
[0731] Ma J F, Tamai K, Yamaji N, et al., 2006. A silicon transporter in rice. Nature 440(7084), 688-691.
[0732] Ma J F, Yamaji N, Mitani N, et al., 2007. An efflux transporter of silicon in rice. Nature 448, 209-12.
[0733] Ma J F, Yamaji N, 2006. Silicon uptake and accumulation in higher plants. Trends in plant science 11(8), 392-397.
[0734] Menzies J, Bowen P, Ehret D, et al., 1992. Foliar applications of potassium silicate reduce severity of powdery mildew on cucumber, muskmelon, and zucchini squash. Journal of the American Society for Horticultural Science 117(6), 902-905.
[0735] Mitani N, Chiba Y, Yamaji N, Ma J F, 2009. Identification and characterization of maize and barley Lsi2-like silicon efflux transporters reveals a distinct silicon uptake system from that in rice. The Plant Cell Online 21, 2133-42.
[0736] Montpetit J, Vivancos J, Mitani-Deno N, et al., 2012. Cloning, functional characterization and heterologous expression of TaLsi1, a wheat silicon transporter gene. Plant Molecular Biology 79, 35-46.
[0737] Reidinger S, Ramsey M H, Hartley S E, 2012. Rapid and accurate analyses of silicon and phosphorus in plants using a portable X-ray fluorescence spectrometer. New Phytologist 195(3), 699-706.
[0738] Rodrigues F A, Vale F X, Datnoff L E, et al., 2003. Effect of rice growth stages and silicon on sheath blight development. Phytopathology 93(3), 256-261.
[0739] Sangster A G, Hodson M J, Tubb H J, 2001. Silicon deposition in higher plants. Studies in Plant Science 8, 85-113.
[0740] Scheet P, Stephens M, 2006. A fast and flexible statistical model for large-scale population genotype data: applications to inferring missing genotypes and haplotypic phase. The American Journal of Human Genetics 78, 629-44.
[0741] Sonah H; O'Donoughue L, Cober E, et al., 2014. Identification of Loci Governing Eight Agronomic Traits Using a GBS-G WAS Approach and Validation by QTL Mapping in Soybean. Plant Biotechnology Journal, In press.
[0742] Sonah H, Bastien M, Iquira E, et al., 2013. An improved genotyping by sequencing (GBS) approach offering increased versatility and efficiency of SNP discovery and genotyping. PLOS ONE 8, e54603.
[0743] Tuna A L, Kaya C, Higgs D, Murillo-Amador B, Aydemir S, Girgin A R, 2008. Silicon improves salinity tolerance in wheat plants. Environmental and experimental botany 62, 10-6.
[0744] Xiaoyu D, Min T, Weishuang W, 2013. Effects of silicon on physiology and biochemistry of Dendrobiurn moniliforme plantlets under cold stress. Agricultural Biotechnology 2, 18-21.

1-161. (canceled)

162. An elite HiSil Glycine max plant, wherein said elite HiSil Glycine max plant comprises in its genome a chromosomal interval comprising a H1 haplotype.

163. The elite HiSil Glycine max plant of claim 162, wherein said chromosomal interval corresponds to a genomic region or portion thereof from Hikmok sorip chromosome 16 at about 92.6 cM to about 132 cM distance as indicated on a genetic linkage map from Hikmok sorip (PI372415A).

164. The elite HiSil Glycine max plant of claim 162, wherein said chromosomal interval corresponds to a genomic region or portion thereof from Hikmok sorip chromosome 16 corresponding to physical positions 31.15M base-pairs to 36.72 M base-pairs of Williams82 reference genome.

165. The elite HiSil mcix plant of claim 162, wherein the elite Glycine max is a commercially elite Glycine max variety having a commercially significant yield.

166. The plant of claim 162, wherein the chromosomal interval comprises any one of, or a portion of nucleotide base pairs corresponding to positions: 1-2658341 of SEQ NO:1; 567613-569933 of SEQ ID NO:1; 564:321-567612 of SEQ ID NO:1 577172-579696 of SEQ ID NO:1; or 573723-577171 of SEQ NO:1.

167. The plant of claim 162, wherein said plant has increased Si accumulation in any one of the plant leaves, plant stem or plant parts as compared to a LoSil plant.

168. The plant of claim 167, wherein said plant has at least 1.2×, 1.5×, 2×, 3× or higher Si accumulation compared to a LoSil plant.

169. The plant of claim 167, wherein said plant comprises a Si concentration of at least about 1% Si concentration in leaf when said plant is provided with a supply of Si at a concentration of about 0.8 mM, under hydroponic conditions,

170. The plant of claim 162, wherein the chromosomal interval is derived from any one of the plant lines selected from the group consisting of: PI372415A, PI209332, PI404166, PI437655, PI89772, PI372415A or PI90763.

171. The plant of claim 162, wherein said chromosomal interval comprises SEQ ID NOs:14 or 16 or a portion thereof providing increased silicon uptake in a Glycine max plant.

172. The plant of claim 162, wherein said plant comprises a molecular marker associated with increased Si uptake capable of being amplified and identified with the following primer sequences: SEQ ID NOs:2, 3, 4, 5, 6, 7, 8, 9, 1.0, and 11.

173. The plant of claim 162, wherein said plant comprises a marker capable being amplified and identified with the following primer sequences: SEQ NOs:12 and 13.

174. The plant of claim 172, wherein said molecular marker is located within HiSil region genes, as defined by an nucleic acid selected from, the group consisting of: A(33673022), G(33673483), C(33681630), T(33682500), G(33683047), and C(33683049) of genes Glyma30000 or 30020.

175. The plant of claim 162, wherein said chromosomal interval comprises a nucleic acid encoding a polypeptide with an amino acid sequence comprising SEQ ID NO:15 and, further wherein the polypeptide comprises at least one amino acid corresponding to a proline at position 5, a isoleucine at position 295 or a valine at position 439.

176. The plant of claim 162, wherein, said chromosomal interval comprises a nucleic acid encoding a polypeptide with an amino acid sequence comprising SEQ ID NO:17 further, wherein the polypeptide comprises at least one amino acid corresponding to a histidine at position 322 or a glycine at position 431

177. A plant cell, plant seed or plant part derived from the plant of claim 162.

178. An agronomically elite Glycine max plant capable of accumulating Si in leaf tissue at a concentration of at least 1% Si concentration when plants are provided with a supply of Si at a concentration of about 0.8 mM under hydroponic conditions, wherein the Glycine max comprises a genomic region comprising any one of SEQ ID NOs:14 and 16.

179. The plant of claim 178, wherein said plant has a leaf Si concentration of at least around one point two (1.2×), one and a half (1.5×), double (2×), or triple (3×) the concentration of a control plant not comprising said genomic region.

180. A plant of a soybean variety or lineage having high Si uptake, provided that said variety is not Hikmok sorip.

181. The plant of claim 180, wherein the soybean variety or lineage comprises in its genome a chromosomal interval comprising SEQ ID NOs:14 or 16 wherein said chromosomal interval is derived from Hikmok sorip.

The application's sequence listing, which the Patent Office published only in electronic form, follows.

SEQUENCE LISTING (638 sequences)

SEQ ID NO: 1 - DNA, 2658341 bp, Artificial (residues 1-1,329,171 of 2,658,341)
  Glycine max
  misc_feature (103753)..(104839): n is a, c, g, or t
  misc_feature (209110)..(211854): n is a, c, g, or t
  misc_feature (291836)..(291935): n is a, c, g, or t
  misc_feature (389067)..(389166): n is a, c, g, or t
  misc_feature (419259)..(419358): n is a, c, g, or t
  misc_feature (443611)..(443710): n is a, c, g, or t
  misc_feature (599696)..(599795): n is a, c, g, or t
  misc_feature (756814)..(760025): n is a, c, g, or t
  misc_feature (781507)..(781606): n is a, c, g, or t
  misc_feature (782495)..(782720): n is a, c, g, or t
  misc_feature (788906)..(789137): n is a, c, g, or t
  misc_feature (888185)..(898864): n is a, c, g, or t
  misc_feature (906092)..(906936): n is a, c, g, or t
  misc_feature (911845)..(911971): n is a, c, g, or t
  misc_feature (916367)..(916475): n is a, c, g, or t
  misc_feature (929997)..(933000): n is a, c, g, or t
  misc_feature (937043)..(939575): n is a, c, g, or t
  misc_feature (941184)..(942288): n is a, c, g, or t
  misc_feature (1005853)..(1006465): n is a, c, g, or t
  misc_feature (1069118)..(1069217): n is a, c, g, or t
  misc_feature (1084469)..(1084904): n is a, c, g, or t
  misc_feature (1085962)..(1086544): n is a, c, g, or t
  misc_feature (1089131)..(1089667): n is a, c, g, or t
  misc_feature (1090800)..(1091327): n is a, c, g, or t
  misc_feature (1115013)..(1115496): n is a, c, g, or t
  misc_feature (1116960)..(1117664): n is a, c, g, or t
  misc_feature (1166110)..(1166456): n is a, c, g, or t
  misc_feature (1193544)..(1193643): n is a, c, g, or t
  misc_feature (1195091)..(1195346): n is a, c, g, or t
  misc_feature (1196453)..(1196552): n is a, c, g, or t
  misc_feature (1211640)..(1211739): n is a, c, g, or t
  misc_feature (1235009)..(1235108): n is a, c, g, or t
  misc_feature (1251926)..(1255136): n is a, c, g, or t
  misc_feature (1263794)..(1264245): n is a, c, g, or t
  misc_feature (1269110)..(1269366): n is a, c, g, or t
  misc_feature (1278021)..(1278120): n is a, c, g, or t
  misc_feature (1285084)..(1286438): n is a, c, g, or t
  misc_feature (1287825)..(1288070): n is a, c, g, or t
  misc_feature (1307014)..(1309426): n is a, c, g, or t
  misc_feature (1341890)..(1342100): n is a, c, g, or t
  misc_feature (1441966)..(1442071): n is a, c, g, or t
  misc_feature (1445194)..(1445293): n is a, c, g, or t
  misc_feature (1446717)..(1446816): n is a, c, g, or t
  misc_feature (1455755)..(1455955): n is a, c, g, or t
  misc_feature (1458443)..(1473148): n is a, c, g, or t
  misc_feature (1475299)..(1475935): n is a, c, g, or t
  misc_feature (1486634)..(1487015): n is a, c, g, or t
  misc_feature (1487866)..(1488349): n is a, c, g, or t
  misc_feature (1489349)..(1490348): n is a, c, g, or t
  misc_feature (1497438)..(1508885): n is a, c, g, or t
  misc_feature (1510324)..(1511850): n is a, c, g, or t
  misc_feature (1584465)..(1584957): n is a, c, g, or t
  misc_feature (1650541)..(1660103): n is a, c, g, or t
  misc_feature (1661222)..(1662081): n is a, c, g, or t
  misc_feature (1665037)..(1673760): n is a, c, g, or t
  misc_feature (1860694)..(1861645): n is a, c, g, or t
  misc_feature (2306806)..(2306905): n is a, c, g, or t
  misc_feature (2532762)..(2533138): n is a, c, g, or t
  misc_feature (2602330)..(2602429): n is a, c, g, or t
  misc_feature (2604640)..(2604739): n is a, c, g, or t
  misc_feature (2628594)..(2628693): n is a, c, g, or t
tatgatctccatcgtcaattttgagagcaccgcctccaagataaagcttctgcaaatttgaaaggttcccaagttgggacggtatacttccttcaaaagaattgtagctgagatcaagatgcagcaactgggagagatttccaatttgagagggtatatttccttcaaaatgattggcgctgagatcaagatgctgcaactgggagagatttccaagttgacgagggattgaaccctccagagaattcaaagcaagatttaagtatttcaaatgagaaagagagccaaactgagttggaatttttccgccaaaacgacaatattccagatcaaggtatctcaagttggtgagagaaccaagaaactctgggattcctctgccttgaaaagaattccaactgaggtttaaatactttaattgttgcaactccatcaacgacttgtggatctctccgctcatataattaaactcaccaccgtgaaggtcgagcattagaacatgggcggtgaggttagtgcagcgaatcccttgccattggcagcaatcagaagtggtccaagaagagagcatgccatagggatccagaagtgcagccttgaattggaggagtgcttccctctcagtctgaatgcacataatatggtcttgagcagaaacaacaacctgaaacatcattaatattattatgccttccatgaatttcaaaccaactggagtttattttttacttttaataaataacagtaaaaaaaagttttagatattcatacttttaataaaaatgtgtgtataacttttattttgttatttaaaagttaaaataatttgaatagtctagggggttaatttaattagttggaaattaatataaatttttttatattatctttgatttcaatagataaaaaaaataaaggagaagaaggggagaattggataaaagaaaaatcttagcttggtatttaatttgctgaaaagatttgaagcatataaacatggtcgctatgaaatgggttcggcatacaacactttagaaaaataattattttaagggaaatttttgaacgaaaactttcatccaaatgccattgaatttttattttaattttaaaataaattttgttcctaacttctcttttaaatatgtaacaattttattagttcatattatttttttacaaacattaaccaataaaattggtatatatttaaaagagaagttaggagaaaatttatttattagataatattataaaatacttcaaatataattgaatccattgacttatatatttttagctttcagtttttaacttttcaactttcaaactttataatttcatctacaattttaactatcaattagcaatattttaagtaatcgtccaaaacacaacctgaatctatggtggcaaaaattatgagcaagattttgtgcactaattacttgacccatattttgttatgcatttcgaccgaaagattttcagtttaaaaatgctaaaatgtacttaactaatgtagtgtatatatatatatatatatatatatatatatatatatatatatatatatatattatattagtaaaagtgactatcactacacaacaatggcacaattgctgctatgttcccaattgctgctatgttcccatttttcttttattttccaatttaatatttaaccaattaaataaaaataatgtagcattctaaacaagtctccagtcaagaagttgcaaaaaaaaagttttttaaaaaaattaaaaagattactcatccgtaacttttgcactttgtttggattagagatgaaatagagaaaaatgaaagagaaaaaaagatagaaataaaagagaaacaaggtagagaatttatattgtttaaatagaaatagtaaaaaaatgagtgttttttttaggaatcctcccataaaatcaatattgcttctcacaaaatcctcccattttaccactgtttttgaggaatcaatttttttttggaccccactaaatttgtttttacttcattttcatttccatcccatctaaatcaaaagttcccatttcattttttttaccccactaaatttgttttacttcattttattttcagtccatctaaaccaaaagttcctcacttcttcccaatttatttccttccaaatgatcctagtggaggacttcaaattatatgtaattgacattaaaatcataacgtgcttgaagtggcattcaaagtaggtttagttgaaaaaagtaaccatgttcttaacgaagaagaggaaattgggtttaaaaacatataccatgcttgaagaggacattcaaatttaaagttaattaatctatttgtcctagatactaatagacccataaatgatttttttattattaaattgaccatgttcttaatatatatatatatatatatatatatatatatatatatatatatatatatatatatatatatgctttaaaaaaaggaagaagagaatattgagaaaaaagaactaaaatattcaataaattaaaacaattcaattccaattaaattcacaccaaaacccaatactttctataatttttaaaattcttaattggctataatttcattattcctatacatcaatatattaaatatcaaatataaaataaatttcttaatatcaattttatatttgtcttatatatcaaccaaaatatgtactccttaatataataaaaaattaatactatgacactttcaagggatgacttgaaaaaatatatcatcaatttgtcatgaaaataatgtatgattgacaaatatagctaatagaacttaaaaagagtaatgacattcaaaaattgaaaaaagccactatattctactctacacataaaaaagtgtatgcatggtgtgagccttttttgtgtgtgcgtacggagagagattgaaaataaaatttattgtatgtttaagtcgaaatggattatatttgaatcttaagagaaagatcattttgaaggttaaaatgggaaaaatgaaaattattgaattaagattaaaaataatatatcattgaaattattgaattaaaattaaaaataatatatattgagattaaaacttaattataaacatagaatgtaatattattattgtctttgtctttattgttgttgtcattatccttgtcatcactatttatgccttgttgccactatcatatttgatggttcaacatctacatatatcatgattcaaccttgaaaacaaaaaataagggggcaaaacaaacggtgcttcaacctctaattcaatccgaaacattatgaacccaaaaaacaatgaacaaaacataggagaatgatctattttaagaagaaaaaaatgacaaaactgtgaataaaaatttaaggaaattgaaattcattgaaatcaaatgagatttgaattgcgattttcacaaatacattcaaatgagaaaacatgaacgaacctgcaacatcataaatattattatggcttgcatgtatttgaaacgaactggattcatggttggcattttggtgattatgatcagaaaggcaaagtgattgatgaaatgaatccactgaatatgagaattagaatgatactgatgactttagcactaccaataggcatgcatatatataacatcgggatggttaatggaagtcacatttctcaacggttgggccactcataaattcttccaagtatgtaaaatatattcaaataatttcttttgatgcaaatagtctgattagttatgtttattttataattatttctttcccgttttttttaattatcagctctttttatattatttatattatacatgttatattctatatatttatgttataaatataaaagcaaaagacgtaagtattatgacgtttctaaaatataaacaagtaactaaaactatgaataatggtaaaaatgttgaaatataaaagtgtgtataacttttattttgttatttaaaagttaaacggatttggatagctaggggatttagtttagctggttgaataagatttataaattattatatatcttttgttattatctttgattcttacggataaacaaaagataaaaaagaagaaattggataaaaaaagcttggtatttaatttgttaaagagatttggagcacgcatgcacgctatgagatgggttcgacacacagctaatttccaatcagacctcgtattggtggtactataacacgtctaaataatagttaggacttctgtggtcatgtttgcttctaccacaactatttttagaataattcaaactttttaatttcatctaaagtttcaactatcaattaacaatattttaagtaattgacctaaatacaacctaaatctatggtgacagcaagattttgtccactaattacttgacctatattttgttacgcattttgactaaattgttttcagtttaaagatgctaaaatgtacttaggttcccacacaacaacagcacagttcctagttaagttcccacttttctttttatttttcaatttaatatataaccaaataaataaataaaaaagacttaaaaataatgtaacattctaaaccatatatatcaagggagacttggaaaagtctccagtcaacaagtcacataaagttgatcgtatatagtaatgcaatttcatatttaaaataattagaaaattaataagcacaaaatttgtaatttatgaaagcaaaaaatagcactttgaaagaaaaaaaaacttttaaaaagattaactcatccgttacttttgcactttatttggattagagatgaaatagaaaaaaatgaaagagaaaaaaaaagatagaaataagagagaaacgaagtggaaaatttatctatttttttataaataaaaatgaaaaaaatgagtgaattttatattatttaggaatcctcccgtaaaattaatattacttcaaacataatcctccatttcaccactgtttttgaggattttttttttggactccaataaatttatttttacttcattttaatttccatcccatctaaaccaaaagtttccatttcattttccttcacttcttcccaatttattttcatccaaatcatcctaaacaagtgcaggacttcaaattatatgtaattgacattaaaatcataccgtgcttgaattggcattcaaattgggtttagttggaaaaagtgaccatgttcttattgaagaagaaaaaattaggtttaaaaaagtatatcatacttgaagagggcattcaaatctaaagttaattaatctatttgccctagatatcaatagacccataaataattttttttattaaagtgagcatgttcatgttcttaaggaagaagaatatatatatatatatatatatatatatatatatatatattcaaaaaaaggaagaagagaatattgagagaaaaaaggaagaagagaatattgagagaaaaactaaaatattcaatatattaaaacaattccattcacaccaaaaatcaatactttctacaatttttaaaattcttaattggctataattttattattactatacatcaatatatcaaatatcaaatatagaataaatttattaattaataggacttgaaaaaatatatcatcaattttcatgaaaataatatatgattgaaaaatatagctaatagaatatcgtacttaaaaatagtaatgacattcaaaaattggaaaaagccactatattctattatacatgtaaaaatgtgaatggtgtgagccttttttttttctgtctgtgtggggagaaagattcaaaataaagtctattgtgtgttttatttgtttgagtggagatgagtcatatcataatcttaagagaaagatcggtttgaagactaaaattgaaacaaaaaataaaaaatattggtttaagattaaaaataatatatcattgagattaaaacttaatatatatacacccctttctttttctttttaacctaccttgacattttttttggaaatatatatacaccttaatctctaaggaattacaaattgagtacgtgttcatattaatattttgtgccataagacttatcatagttacatcatttgcagttctattacgtcacagggaggaattttctatttcatcaatttttgctatatgttggattcagaatatgttaattacaaagtattccttatacttaacaaattaaaaaataccaagagaagcctatgtcgtgtctgaatttatttggtctcatttttaattttaattcataacagagcttcctcaagtattttcctttacagcatcttccgcaacaacttctaaatcttctcatccatttgtgtagctttcctaaatgttctgtgattatatatcttcatctagaataaatttattgactttgcaaacagagaattggaaattaatttttattaagtggcatgcccttgtatgactttccggaaacaaaacaaagaaagacttaagaagcactccaatcaacatcacattacataaaaaacaattaagtataaaatttttttataagtaatatggtccttacacgactccattggaacaaaacaaagaaagacgtagatgaatttattttctttaaaaaaaagaaatatgatttatgttttccacaacatattattattattattataatttcttctatgtaggaaccaaacaaaaccataaagacttagaatttaagattccagtcattgcgctaaacaacaaatgtggaaaattttgtgaagtgacatgacccataaatagactttgtacttgggaacaaaacaaaaagacttagaaaattcgcaagatacccacattgacctttgtctatattttgctaacgtaatatacagactattacttcattgattttgattgataatttcttttgaaggaattctgtgtcaacaaaagtggtgcttatgtaagttctgtataatatactacctacgtatggtcttatataaaaaaataaaagataacatatttttttcttttaattataagaatgataagactattttattattaaatctgccatagtatataattcgtaatccagataatatttattgatcttcatatcttgcaccaaagaaaatcctaagtctttaaccattcaaacttatatggtttgtcgccaaccaaacttggtggtaattagggagaattgtttttgcttttgaaaattatagtgtttgctgaaatgacaacttgaaccggaattaacttaatggttgtatcttgaaactttggtgttgtttctctagatgtgtatactgtatacttgaacgaggattttaattactttagttttggtattttttattctaatccaattcaggttgagttttgtttacatcctgaattagaatttggtagttgttagctttttattactgatgcatcagcctattgcccaaacctattgttatttcttgataatcagttataagttgtagttttaagtttcataatttttattttaaaccaaaccaaacatgaaagtaacatcttatcttttttgaataaaaaattataacttttttggtatatttttttacaactttttcccctcttatttgaaattttgagaataggaatcaaaagtaacatttttgtaagtaacactgaaaacaagaaatatgaatttattctctttttttaaaaaaagaaatatgatttgtgttttccactacatattattactataatttcttttgtaaataatattgtcattgtcacaatgcggcggttgagtgagtttttcaaaagaaaatttgagaatcgctatcaatgtttatttaagaaaaacatcggaaaaaaaaaaggaatgatttacaatttggtaaaaaaaaggattcaggagttatttatgtacgtgaaaggtattaacacctcacgtatctgtcataatgataacaacctttaattcactctaataaaaataaaagcaacttcttaagtatttatcttcccttgagaacatgaattatgtttgttatattttgtttaatttaaaaaaagaaagaaattctttatttttagtaaagaagaaattttatgtttttatttcctagtgttttaggtcaacaaggggttttccctcacttatacatatccccaggtgtaatgaggaaatcatacttatatagttctttgggtaaaaaaaaataacttgtgtgttggttgattttatcttcttttgaatgatttgtatttaattgtgtgaataagaatcattaaagtattggaccttgaaataatattaaatttcaaaaaaataatagagagaatcacttaaggcattgaaacaatctcgagtaatgtgtaatattcattgagaaaaaaaagaattgaatgtttatttatttgaatatttttactcccttttctagaaaagattttggttgtgataaacgttaggaagtcaagaaagttggagactttgcacgacattagcaaaatttactcacatgttattaaaacatcatcaagtaagtcgaaaatccaacatgaggtgcacaaaacataaaaaagataaattgattgattatttatttgagtattctttttcctctttagaaaagatgttgggtttgctgtaaactttgtaaagtcatgacatttactaaatttactcatattttattgaaatactatcaagcaaatcagagactcaacatgtagtgtacaaaacgtaagtgcataccaatgaatactaatgcaaaattgcaaaaataaatgaataacagtgttaactaatcaaataaatcgaatgagaatagaaaaagatagaataaaagtgaaaaatatactaagtaattaaggttacggggttgaaatgtgggggaaaataatatatgtagcgggatatttagagcacattataacttaaactaactaattggggaatgaagaaacaatcaaattgacgaataagataaataatagagacaattagaaaaattaaataaaaataaagagttttctatcaatttattattattattattattattattattattattattatcattcatttattaatttagggtcaaagtcaaattgcatacattgagaagcatacatggagaaaggggtgtagctagcaatatttattttatctaagacttcttgaaaacagactaggcccaaaatgcaaggggtgtatgtgtaaaggcagcgatatttattttatttcagatttaagcaaatgagttaagccgaaatgaaagagggtgtatgtgcaaaaagagttgtgtatggctagcagtatttcttttcttttaggcttctcaaaaatgaactaggtccaaaataaaagaaggtgtatgtgtaaaaatagggtgtaaataacttttgtttttgtttcagacttaataaactaagccgttcaacattttttttcttttttcggctttttttattgggcttagattagaagttaaaatgacccggcccaacccgaaagtaagcacaagggtttgaaaacccttggtgcctaagcctcaaaagggcacagaaaaggtgggtaccacgatggagggtggcgcgggccctgacgcttcttgcacaggggcctggcggcggggcgaaggcagcacagctgcacggcggtggggcgatggcagagttaaaaaaatgaaaatgcaacgaggaaggtgatgataaactaaaaacgaaatgaaatgatagcgcaacaaacatcaacaacaaaattctaaggatctcatcggcgacaaagaagctcatcaatgaaatgaaatgaatcggcaacatgagtgatgcatctttcctgataagttcgtgattttttttctgaagtagatcaaacaatgaatttgatagcacactttaatttgtactttttgtgatcaaagatagcttattttgttatacaaatgttacctagtgcttattatgtgcaccgtgcacgtaacacttattgttgatttgttatcattcatattagttttctggttaaacatagcactatatttcagattagagcgtcaccctcttttagatgatggaacaattgtagtttgcacttttctgtgcttcttgtctacttaaacttatatatagtaattgcttgcttgcaggaagttcttgacaagtgacaacgagtttgagaagcgtataagaccagagcttatccatgaaaacgaaataggggttagacttgcagatgttggtgcattggatgagatcaaataatcacttcaagagttggtaatgcttctaatataaagccatgtagaggtatattgctttttgggcctcctggtactgcaaataaaatgctggcaaagccaattgcaaatgaagctgctgtgcaagtttcattaatgtctcaatgtcaaccatcattcacattaaaatggttcggagaggactaaaatgaactagttaaaagtggatttttaaaacctagaaattttattattggatttgcgaccattcatcttcaatgatacatttcaacaaaggaaggagtccttcaccagagatgttgaactcaaagcatgcctagatgtcccactataacccaaatgtcgcagagatatcatgattcccagaaaagcacaagttctgcgacacacatctattctctaaaggacgtgtagatcatcatgcattatgtttaggaatgggttctcggttttggtttgagttgtctacaaaccaatgagcaccagtattagagaatttatgttatgtcatgcatggttttggaagatgcaatggctttgtaggaagtaggaatatattactccaaacattttaggtatgctgtattatatatgacaatagaattttgtaaatcgaattgtctttaaactgtactgcttatccagatgtgcaacatcaatcgaattttgtaaatctaacttcatctatgattaggtcagggatacatctatcacaacatcaaatgtgtagtcacaatattaacttttcacaattatactacttcagacatttccccgcccttaaccctttaaaatgatcataaggagtcatatcaggagtttgttagagatcctgcattctatcatcgggttatgtaacttcagcattttctttgggttatattttgattgatgaaaataatcgtggtggatagaataactaacataagagtggtggatagttattaggagaggataacagaagttgactaattaataaagaatataatcgtctaaaatttatggacactaaaagggtattcttaaattaagaactaaaggatagatcacgtctttctaaattttaaaaaataagaaaaaaaatttaaaaagataaaaattaaatatatttaataaaaaacgtgagaataaaaaaatattaataatatagtagtggaaagttatagtaggttagaagaaattttttaaaatttaaaaaatgatttaaaggtaaaattatctaatttaatatggataccaaattgagatattttgtttattattagtatagattaataattaataatatatattattattattgtttctttcttaaaataaaagacatgcatagtttgaaaattggagccatctccatataattgaaacatatggtgtcaaattatttgtctaattatgacaaaatgatgatgatagattcattcatacaaaatatgtgcatggaattttctaatttttttattcttaaaatattgaaaatgaggcccttggcaaaatgtttagctcaatactgtttttgtcaaaaccaaaattttgattaagagaaatatgcacaaattattgatataatacattgtaatttatattttattacaagcataatgctaataaaactagagtctttttaaaattaactagagtctttttaaaattatcgaaacatgatataagtatctcaattgatactgaaaaaatataaaacaatcataatttccaacttattgccttttccaagcaataacaagcttagacattggggtcatgcaagaggactagtgtcttcaagagactgaaaattaaaaaaaaaaaaaacagaatgttagtttccaaaatgtgtaaatgaaaaataaataaaattcttatacctataaaaagaaatttgttgaaattgaagtaagaagaataataacataaagttaacgatagattaaaatcacaataatttataagaaaaaaatttatagtaataatgaagatcatcaatgttttatgattaagtattgaatatttagttttatattattaattaattttaatataacttttgtaaaacttcacaaacttatcatatacacatcactaaataaatgaatgacatgtataaaataatttaacattgttagtacacaatttattttctctaattatatctctattttattttattatcatcaaaacttttcatccaaattttaaaagattacataggacatagttttattgaaataaagtattgaatatgaacactagatcacccgaccactcaaccaagcaagaaatcgtgaccctacataatgagcatgctacatttgcacatttagttattaatgggtaataaatcttaaatttcttttataatttatgaaaacaacttagccattgtatcacaaaaataatatctcttttaatatatatatatatatatatatatatatatatatatatatatatatatatatatatattaaacaaattactatacacacaccattaatttcaaacgaactggaaatggaaagctagttatatcagcaaataggtaaatacttgtccaatggctatgtaaagacaccatcaattacgtgaccagattttctagttactgatcttggatgtgaacagcttgtcccatggattgagtctgttccaggaaggcaagagtagtgggaatctgaagactaatgaatctaacgaggtatgcttggagtagtgggattgagtctgttccaggaaggcaagtttcattaatgtctcaatgtcaaccatcacatcaaaatggtttggagaggatgaaaagaatgtccgagctctgttcacactggcagctaaggttgccccaacaattatctttgttgacgaggttgacagcatgcttggacagaggactagagtaggagagcatgaggctatgaggaagattaaaaatgaattcatgacacactgggatgggctattaacaggacctaatgagcaaattttggttcttgcagcaaccaacaggccatttgaccttgatgaagctatcataagacggtttgagagaaggtaggaccacacctttgtcttattgtttgcatgatcatgtgttgcttctattcagcaacaacatttttgcaatcagaacaaagactgcatttctccatcattatgatgagcatatgtttgaccataagaaaacaagaaaattcataacaagtggtcatttcatcaatttccttttgaggtgtctattcttattttctatatagctgacaataccatatgcccccccttgaagacagatatctttctgtagcttgccttaactcttttagcaacagttcttgcctcttaatttggcatttaaattgttcacaaattgagtctgtcagatgtcttttatggatacaataaaatcaagtgttttcaactgtgcaacatcaatatttaatgctttttagttcaactattattgctcttgtaacttgtgaatcataacactcacctttttattgttgagcaggatcttggttggtcttccatctgttgagaacagggaaatgatcttgaagactcttttggctaaagaaaaacatgaaaacttagacttcaaagagctggcaaccatgacagaaggatatactggaagtgatcttaaggtgaattttgggggcgatttactggttttattttttttgggaaaataaattgatgttaatttctgtgaacagaatttgtgcatcactgcggcttatcgacctgttagagagctaatacagcaggagagaatgaaggacattgatacggatttcaccagggggtacgaatgacacaggggggtctgcaggaagtaagcaccaaaggtccaagaggaaggaacgtacagcatggttggcatcatgcatcatgcatcatgcatacatgcaccatacgtagtaaaagcgcaaaccatatgatagcctcgtgtcttctagaagatgcgtgggcagtggaataaaggcatatttgatgttaggatatttctgattgcgtgatgagcacttcaatcaccactcctccatcagtgccaactttgccaatcaccgctgctcacaccactctaccagagggtgcagttagcattacccatctggcaagcatcatagctcttcctactccaaacatctttgcccaagtttaagatcagtttttgctgcagtaattcacattcaattccttggcaatgaatccttttaatctcatataacttatttccttaaatgaaatcatgagactaatgtacaaaagcacatcaaaatccctagatcaaacacggtttactatttctacataatcaaagagcatgacccaaaaatcaagaaacaataaccaaacatctcaattctcattattgtgaagattcatcaacttcatacaaaacaactagttcagttttaagggctaaagtacaaacaaaatgcttagaaattaaaaaggaaaataaactagatcactatcacaattggctccctcaagctctagaagccttccttaattctctctcggtctccaaatccaactgtgagagatgccttctcacctccaaaagtatctctttgcattttccacctccacaagctggcacctagaattcagaatttttctgccaaaaattaaaatatcgatccttcaacatttgccctcaactagaagtaataaaagaataaagaaaaaattgaaatgccaagaaaatcaccatgactaaaagctatataaagaagtagataatgagatagaaaaactacctcaaacttattctctattttaaacttaataacttacaaggaggaaaagcatatatcaagaaaaaaaatatacgttatttatattgagttattatttagcgattataaaataggttaaagtattataatttgtttaatatgaaatattagtgtaaagaagttttataacctacataacaatcatcattcctttaatttatttaactaatacgaaatggtatgaaaataaataaaattaaatatattaattttaatagatcccatgtaaaaatccaatacgttgaactatttgaaattattatatgctttttagaaaaacatttatcaaaaattgattatattacgggattaacaaaattccaaaagatgatttgtaatcatattaaaagacattttgagataagaatatttaaaatatcaagatttagattcctcgaatgtgtatgtacaactcatttaatatatattttcaagcatcatatgattattgaatattaaattaaaaattagtattttataaacaatctaatctggatttcggaaatgcaaaacaaacatgcatgcatgttctacttttctttttcattattatgtaactgcttgttcatctttagttaaaactagttcgttcaaagatatatcatacatgttctagctagtcttcttttaagaagaaaaccggactacaacttgtttaccttaggtgtgatagtaaactaagtttcgtgttgatgaataattattttttttattaatcgagggtctcaaggttaaaacaaaagagaaaaacgccatctagttgtaaactaaggtttgtgactgctatttatcatataaaggaaaatgaagtatatatacgaagactaaaatattattaccagctatcctctgtgacgccacttgaaaactttcactgctaccatgactaaaatatagtgtagcagtaatagttactacatgatattacatgatattaaattctgctggtaaaaaaattaatataatattaaattccttattatttcaataaacacaacaatattaaaataaaaaaattctaaaaatttttagttaaaattaactatcaattaaactcaaaatttacaattatcaagatagaatttgttgttcccgaatttagacataagtgttttatacggtctcactatatcccaaatgtcacagggatatcatgattcccagaaaagcacaagtctaccacacacatcttctctaaaggacgtgtggatcgtcatcttctctaaacaacttattcattctctatatggtatcagtctaagcttattcgtgaccttgaaggctacgtcattggcaaaacaccttgccctcttttgatgaggtatttgttaaattgcagaactatgagatgtatctcaagcgtcatgagcattacccatctggcaatcatcttatctcttcctactccaacactatttgccaactctgctccaagaagggacatagtgctcacacctgtcactgttaagttttgattttacggattgtttaagtaacaacccaatttccacctagtccaaacaactttgcccaagtttaagatcagtttttgctgcggtaattcacattcaattccttggcaatgaatccttttaatctcatataacttaattccttaaatgaaatcatgagactaatgtacaaaagcacaacaaaatccctagatcaaacacggttttctatttctacgtaatcaaagagtatgacccaaaaatcaagaagcaataaccaaacctctcagttcccattattatgaagattcatcaacttcatacaaaacaaccagttcagatttaaagaccaaactacaaacaaaatgcttagaaattaaaaaggaaaataaactagatggatcacaatcacaattggctccctcaagctctagaagccttccttaattctctctcggtctccaaatccaattgtgagagatgccttctcacctccaaattaaaagtgtctctttgcattttccacctcaacaagctggcacctacaattcagaatttttctgccaaaaattaaaatatggatccttcaaaatttgtcttcaactagaaataataaaagaatagagaaaaaattggaatgccaagaaaattaccaacactaaaagctatatcaaaaagtagaacatgagattgaaaataggtaaaagtatttataaggagaaaaaatatatatcaagaaaaaaaatatactttatctgtatatagctattattttgggattagaaaataggtaaaagtattttgatttgtttaatatgaaatgttagtgtaaagaagttttataacctactaaatttaatataacaatattaataatcatttctttaatttatttaactaatatgaaatggtataaagataaatatattaatattaatagatgcccatgtaaaactccaacacattgaagttaatactaattagtaattagactctttgaacttattatatactttttagaaaaacatttatcaaaaattgattatattacttttctttttcaacttttctttttcattattatataactgcttgttcatctttagttaaaactagttcattaaaagatatatatatatatatatatatatatatcatatattaaccgaactacaagttgtttacctgcagtgtgatagtaaactaaggttcgtgttgatgaatacttgtttttttattaattgagggtctaaaggtcaaaacaaaagagaaaaacgtcatctagttgtaaactaaggtctgtgactgctatatatttatcatataaaggaaaatgaagtatatatatgaagactaaaatattattaccagctatcctctgtgatgccacttgaaaactttcacggctgccatgacataaatagcatctgagaaattgcttatgaacttgaaataagcatgtctccaagaacgatttattaagattgagccaaaaacgccccaaaagcttataacaaatccaattgccatactcatgtaaaattcacgggtgaaaagcaaattttcatcttcaggaagtttaacaattggttcctgtgcaggcttcccatcaatacacaatttctccagtggcggtccacaaagatcaagattatcttcataacatgaggcattgaaactctgtaattgtgtaccagttggaatttctccagatagattgttatgtgacaaatctaacatgcccagtcgatcaatttgagtaagactcaaaggaattgaaccaactagatggtttcttgacaaatcaagaaagtcaagtgatgttaactttccaatatttgaaggaatctttccggtcaaatggtttcttgataaattcaatgaaaccaatccaaataaattctctatttccagtggaatttctccagaaaagtgattgcttgagagatcaatgctttttaaaagtagtaacacattatttttgaacatttgttctgaacctttccacatcaagagtgcattcaaatcatatgtataactaccagacatgccaatgatattgacaagatatgaatgaccttgataatctcttgaagatgtcttttgagtcattgaagtaaaatttttgatgcatttaggaatctgcccagacatgctgtttagtgagacatccaagagttgaatgtcacttaggtagcaaatttgcaatggtaaacttccatggaaattatttcttcccaaacttaaaaattgcaactcttgtaattcgctccctatccaagcagggataagccctgataatctgttttctgaaatatctagcattactagatttgtgcaattcctcaaggagaaaggtatctcatctgttaagttgttgtttctcaatagcaatgcttgaagatgaagaagagatcccatggatgtgggtatccttcctgaaaaattattgtgacttaagtccaaataagttaatggcttgaaatggctccaacagtccggaatttttccagagaaatgattatttgaaaggtctaattcgtacaaagtttcaactgtaccattagcacataaaaatgaaagagaatctgagaattgatttttggataaatcaagaaatacggaacctcgcagaaatggtggaacagggccatcaaattgatttggtccaagaattagggaatattgaatattctttgttggaaaattaggaattataccatggagattattgtatgaaatattcattgaaataaattctcggaatgctaaattagcccaaaaccactttggaaccatatctgctattccagcatttgaaatgtcaatatcccgaaattgattttgtgtctccaaccatttgggaaatactggacctagcttgcaagatcgcaatcctaagtagctcaattgaaatggtgggacccaattttggctaaatgccaaggccaataaagagttctcagataactccaggatgtctaacttagacatattagcaaaatgatagtcagtgagcacaccctttaaggaatttgattgcatatctagttgctccagttgaggtggaaatttaatatctttaggaatctctccatttagcttgtttccataaagatataattctcttaaagatgagaatattgagaggtcgggtagtgtgccgttgatttggttcatgcttagagataattgttccaatgaatatctagcacatccagacaagtgatggattatcattggaaattcttcactcaagctattataagacatgtccaacgagcgcaaagcacatgcatccccaaatgattttggaattccgccttctaaagagtttgatccaattgacaaagattctaacagagatggcaatttggtactctctggaatttttccatttaattgatttattgaaagatccaatgttttcaaggcagagaatattgaaaggtcagaaagcgtaccattgatttgatttgcttctatgttcaattcttgcagcgagaatctggcacacccagacaattgatgaattatcaccgaaagctctttattcaaattgttagcagacatatccagtgagctcaaagcacatgagttcccaaatgatttgggaattccaccttctaaagagttgtattggattgacagagatttcaaatgaaacggtaagcggatgccttcaggtatctttccacttaatttatttccatcaagaaacaatgatcttagagatgagaatactgaaaggtcgggtaaagagccagtaatttgattagatgtgaaatccaattcttgtaatgagtgtttaacacaaccactagacaaattatcaaggaaggattgatggaaggtcttcagtcaaaagatttgctggcatgtataaagaatgtaaggtgcatatattcgcgaaggatttcaaatcctcacccttgaatatattatatgagaggtcgaggtgctcaagagaattcattacacggccaaaatggtttgatgtggaaccctccaagaggttatgactaaggtcaagctcaacaaggttggaagtgacgttggacagccactggagtatcattgatgacgtgaagctgttccaggaaagatcaaggacggaaagggaactagaaaaattgaatttggagggcctcaatgaaaggataaaatgatcggaaaggctacaatgaattaaactcagttctctaagttttggtagcttggcaatcatttggaggaagctatgagaagtgttgagattagatatggagtcgaaggaaagatgggttaaggaaatgagattagacagccaatgatctccatcgtcaattttgagagcacgacctccaagataaagcttctgcaaatttgaaaggttcccaagttgggacggtatacttccttcaaaagaattgtagctgagatcaagatgctgcaactgggagagatttccaatttgagagggtatatttccttcaaattgattggccctgagatcaagatgctgcaactgggagagatttccaagttgacgtgggattgaaccctccagataataattcccagcaagatttaagtatttcaaatgagaaagagagccaaactgagttggaatttttccgccaaaatgagaaaatgacagatcaaggtatctcaagttggtgagagaaccaagaaactctgggattcctctgccttgaaaagaattcgaactgaggtttaaatagtttaattgttgcaactccatcaacgacttgtggatctctcctctgatataacggtgcgaggcaattccagtgaaacgattgaaggcatatcagaagtggccggtgaggttggtgcagcgaatccctttccattggcagcaatcagaagtggtccaagaagagagcatgccatagggatccacaagtgcagccttgaattggaggagtgcttccctctccctctcaatgcacattatttcctcttcagcacaaacaacctgcaacatcatcatcataaatgttattatgccttccatgaatttgaaacgaacaggatcaatggttggcattttggtggttatgatcagaaaggcaaagtgattgatgaaatgaatccactgaatatgagaattagaatgatattggtgagtttagcagtggtaataggcatgcatatatataacaccgggatggttaatggaaggcactttctcaacagttggggcagtcataatttattgcaagtatccaaagggtcttcttcactacctcatcagtggggaagacttggaaaagtctccggtcaagaaattacaaaaaacttgaccgtatatcgtaaggcaatgacattcacatttaaaatatataattaaaaaactaataaacacaaaatttctaatttatgaaaacaaaaaactacactttaaaataataataataattattattataaacactagatgcacccaacattccaacgagcaagaaatcattatcctgattatttagcatgctacatttacacgtttaattgttcttcacaataaatctcatttattttattgttacgaaaacaagttaaccactgtattgcaaaattagtatctctctcaatatgttctgacttgaaattatcatattcttcttcaaaattaattatactaaaaatagttaaaagtcatcaaatcttaccgttacaattcactatataatattactttatcagttattaaatataagttaccaattaatattttataaacaatttactagagatcattgcataataacgataaaaaaaaatacgaagaaagctgcttttatttatagttatatttttttataaaaaaaaaatctgacaagttgcttacataaactatatgaaaagcaaaagaaatggaagggctataatattattacatgcatgctaacctttagctacctttgatattttattacggaacattgctaccttggcacaaatattgtctcgtaaattgttcaagaacctgaaataggcatgttgccaagaacgcttgaataagattccgccaagcatcatccaaaagcttataataaatcccaatgcccatactcatgtaaacttcacgactaaaaagtgaatattgaacttaaggcatgccttgaaatatctaacatgaagagtcgattaatttgagtaaaactttgaggaattgaaccatctagcaggtttcttaacaaatcaaaaaattcaagcgaccttaattaggtttctaatatttgaaggaatttttccagtcaatttgtttcttgataaatttaatgagaccaatgcaaataaattctctgttttcactggggtttcttctaaaaaatgattgttcgacaaatcaatactttttaatagtgataagccattatcattgaacatttgttctgaaccttttcacatcaagaatgcattcaaataatatgatgaatcgcctgaaaaactactggcattggcattatacaaatgaccttgataatctcttgaaaatatcttttgagccattgaagcaaaaaattttatgcacttaggaatttgtccggacaagttgtttagtgagagatccaagagttgaatgcttctgagataacaaatttgtagtggtaaaattcattgaaatgattccttcgcatacttaaaaatttcaaatcttgaatatttccctagctgagatggtatatatttccttcaaaagaatagtacctgagatcaagatactgcaacttggaaagatttccgagttgggatggtatattttccttaaaagtattgaggctgagatcaagatgctgcaagttgagaagggattgaaccatggagaaaattccaagcaagatctaagtatttgatatatttatttcttattttgttgtaaaaaaatatgacgaactattatatatcaaacacaattttttaattttaatttgtaatatgtgaattaaatataaattaaaaaataccaagaaaagttaggtacagggaaaggatttagtctcttacaaagggtaaaattaagaaaaaacaaattaataacttattagttagcttattttaatttataagctatttaagtaattgttacttgttaataaagaccaaaactggtaacagagaaaaattagaatgaccaaaaacactaaaacaattattaaaaattaaaagcaaaaatataaaaaggtttattcatacagactcgtcttttctttcattaaaaactaaaaaagataataaacctttttcattcattttttttggtagagcttcttttactcacacttgttacccatacagactcatcttttctttcatttttgttgtcagagctcctccttttctatgaagctaaacatcttttaaaaaaattatccacacaaaatttcttgatgatatcaagctaaacatgtaacttttacgcatgtataagtagtattcaatgcatatgcatggtctgtataagtcatggattttgttgataataatttaatcttcatagatgtcatggattttgtgttgattttctgatgttttgtgaatatctacatcttgaatatatgaatttgttggccctggaaaacagataattggcctccgtcatcgcattatttaagataataattgtggaaatttttatgaagtggccggcgtggctcctttaatttagaaaagacattgtcatcacaatattatttaaaacaataaatgtggaaatttttatagagtcggtggctccttgtacgactttgtagacaaaacaccaaaaagctagcctacgaaaattccgtcatcgcaatacataaaacaataaattaaacttgatatttcatacataatgtaagttaattttttgcaccgataatattttaatttaagcaaaatgtaataataatgtaaagacttttttatattatcaatctaacgatggattattaaatagggcattgataaacctgttaatttttattataattatttacaaattatattcaaaatagtttgaaatcggttgataatatatatttgtttacatcaataatatgaatgaaaattaaactcattaattttctttttctaagaacaactccaatgcaattgcaattaagttggtttttaagcttaagtgacttgagaatactgttagaacaaataagttcttataatggagtttgtatagaagtttcttatataagcaactacaatcaagattttttaactaaaaataataataattttgaaactaaaagagactattcttgtgtgagtggaaagataaaatagaatctactaaaaaaaataaattaagaaatcaattaagttttaccattaattagagtaaaatgagtactgagtactcgatcataaacaaaggactcactaataaaaaattaagaactcaataatagagttcttacattagaaatgccacaaaagtcaaagcattaagggacaaaattttctttttgtcactaatacttgagtcatgaaaattttagtgagattttttgataaattacatataaattgagtcatgactaatgctaattttcttgtactttaaaaatgcgtttgatatacatacttaagtataatacaaggagaataaagcatcacaaacataaagttacaaatgttacattgataactttttatcatgtgcgttatttggtgaatagtggacactacaaatataaaaaaatatatataaaatttatgaggatgaagtggtcattgtggaagggttgacccaagctttgacaactgagaagccacttggaggagtcggggttgattatcttatatgttgtttctgtatttgaaacaactttaaggcagaagaaatatgttgttccaccgataccatttctccccgcacccttgctaggggtgcaaaatcatttcatttgtgtaattgattatggaagattaggataagatcaaagttggtaatttttgtttttgtattattattattttttgtgtttttgctttatatatttgaagtggaggaggaagcagtggtaggtcctatatttataatttgaaaaaatgttgtagactaaaatctatcataaattaattattttaaaatttaaaacataaagagtgttaatgataaattaatgaaaggactaaaatggtttactcctaaacataaaacactaaaataagacttttaaaaaaaatccaaaatgaaaaacacaaaaagcttatttacattaatgttttcttattatatcatcaatcaaacatctctttgtctctattcttaccactctcaagatatgatatataaatcaaagggtgttcaataatattggtcaaattactaaaaatgatacatatagctagaatgtgagagcagcatatgcgtctgatgaacatgtgtctgctaccaaaattatgagagagggtagtgagaattggagaggtgtgtccgctgagagaaaaaataaaataaaattgagagcgatgatggattttcctgaatgttaaaatcaacgtgaatattaacaaggtaaagccacgagggaggtccagatctggatttttgtcaccgaataagtggttttgtttttatcagtccagagccatggttgggtgaggaagccatttctagctgttaaaagctgcaagcatatcaacttcattaaataataatgggaaaaatgacaggtgccagtttcccaggacaccacttcatcatatgacaggaactaaaagtcgtaactaaacaaaattttgaggaatttgacaagttaaatatttatttaagaactaaaatctataattaaaaaaaattgaaggactaaaacttaattattccttaaaattgttaattgaagaagcatacttgcttgtgaagatgctaccttgaattgtgagagcataaaaataaccttgaattgagaggaatcaaattaagagaatggggttagattgatataaatagcacataccaattaaaattcagctgtggagaaggccttttattagttttatgtaattcattcttttgatcccttacgttaacaagctttaattcattcaaaaatggctaaactcttgaacaagaagtaggtgtgccaatgaaaaccagacagaaattgtaaaaaagaaagataggggacgaatctccaaaagagaaagtaagtggtagacggaggtggacggctgtgaatcataaaaaaaatgagagaaaaatatatatgaattgtaaagaaccaataatcgaaaatatgcaaaatatgggaaccttgagaacgacagagggagatgcgtggcaaccaatcaaggttttgaacaaagaattttatgacggtggggatgagggaggctggaatcagaggcacgtgattgagtaaattttttaattataattattagattaaaattagatcaacgcataaggatttatgtaactctcttagaattatataatttgacggattagtagttcatgttcctagtttctgaatgacaaaccttcatctatgattaggtcagggatacgtctatcttaacatctccccgctcttaacactttaaaatgatcataaggagtcatgtcatgagtttgttagaaatcctgcattctatcctcaggctatgtaacttcaacattttctttgggttatgttttgattgatgaaaaggagaaaaatataatacttatagttccattaattgtgaaggtcgagcattagattatgggaggtgaggttgctgcagcgaagaagagagcatgccatagcgatccagaagggcagccttgaattggaggagtgcttccctctccctctcaatgcacattatttcctcttcagcacaaacaacctgcaacatcatcatcaaacacaccataattttgtccgaaaaaatagcatacttaatctttttatatgtagaatcaataaatagtttttttattttttgttttgttataaaagagttatttgaatgtaaatattctaaagcaaagcagactaaaatagaagctagcaaaattttgtcatgaccctatttaaatcaatttatcttttctagagctaaattttcattattgagtttctcggttttagttttaaaattttttaaaattaaaaccagctttagttttgaatttcggtttattctttgtttttagtttttaaaatgatgttgtaaattgaaaataaataaaatgaatcaattattttaccttattttgctccactataaaataatggtgccgatgaaagtagcaggatccaagtgatgatgacaatggtgatgcggtggaatgatggtgacgatgatggtggaagtggtgataaaaatgtgatgatgatagtgacgacggtagtaggatagaatagtaaaaattacattaatatcattttgaaattgagttaaaaattattttagatccaattttgttgaatgtgtgtttttttgaaaattatatttgaaaattgaaaaccagtttaaatattcacacatgtttcacaataagacctttcttataaaaggcaggcgtcactacatcaattataccccttccaaaattacgaggtttggataaaaaaaagtaaaaataagattaatttgatttaaaattaaaatattataatgcaaaaaaaaattattaggtgtgagcatagagaattattatggctattttttaacgaaaaaatcttaagcatgaacaaaatattgaaatcaaggtagttattgagagagtctatcttagttcattaagtcggatgcgtgaattattataaatctcttggtacttatctttgatacttatagatgaaaaaaaagcaagtcaaatgaaaaataaaatcaaaatggtgttagacataaacaaaatgttactatcatgaataattgttaaatcaaataatagagaaattattagttataacaagttccatagtaaattaagggaaacaattaagcatacatatagcttactcattagttaatcttgccccaaaatttttaccaaaagataaaactaaatataggcacaaattttgatgcactagctcaactattttggtcaaacattgatatgtctaatcctgaataggagaaactccacaaatatttgacaaagattttcaagtgctcaatatatttagtagtaatttggtcaatgaattgaatacaaatataaatattggtacattgagtgttgactagtcatacactaacctgttcaatacaagttacgagaaacttaataaatatttgatggagattttaaaaaactcaatattcttaatagcaatttgatcaatggtttgaatacaagtataaatattagtacactaagcattgactagtcatacactgatttgtctaatactaagttatgaggaactcaatgaatatcttatgtagattttgaataactcaatctgcttaataataatttgatctatgaatcgaatataagcataaatgttggtatagtgaacattgactagtcatacattaacctatatagtataagttaccagaaactcaataaatatctgaaggagatttcgaagaacttaatgtacttagtaataatttgattaatgagtataagtgatgaagtcatagcgcctaataagaaagggggattgcgcctaatcctctctgttccctggtgcaaagtgcaataattttgttcaacaaaaggtctcctctgtagaactgttgagcaaaaataagtgatgaagtcatagctaataagaaataaggaagtagtaaaatgtgattttaaattatgaaatcatagaaaataagagaaatcaaagaaaaagtattgaggaagtagctacatatccaacttttgtgagagattcctgaatcaacagggcatgttggtctctttaataactttacaacaccggtcattggggtttagcaaagacaaacacttatatggttgaagtgcttacagtttttaaaaagatatagccactgcaatgtaatggcacgccagaaaaaatggaacaaataataaccaaaaaaatgagagagaaaataagaaaaagtattggggaagtagctaaatacccaattttttatatagaaaaacagtttagcgagaaaataaaaaagaaaaaccattcttactgtgccatgaatctgaagtattgaacaactcctctacttctagaattccttaggataaatatagtcatgaatacaaaaaaatgaatgaaaatcaattgaatacatttccctaggaatacgaattataccagagcttgtcaaaaaggcactatgccatgctaaaatcttcagaaaatcatacttcagctctgattctaaagattacaggtcccttttccccatgtttgcttccttcatatcctcagtttctccattgatgaatatggtaaaaccatcaagcttctttcttttatctgaagccaaatcaggtttcaacatcctcagttatgacagcaacaaattcgaacacttagtagggggtactatttaaaggcttaattctacgttgaactattgcacgcagcagggtatgaaattcagcttttttaaaatttatttttagcttctaatgattcttactaattaagcatgaggcgaaaaaatatagtaatgatgtgtaatcctattgttgcacatctcagaaattatatattataaatagattgttgcatttttttaatatcagtatcttgggttggaaacagggcagctgcaggagatgaatgatgcatctttcctgataaatgtgtggtgttttcctgatatcatactttaatgtgtactttttgtaatcaaaagatggcttatgttgttatacaaatgttacctagtgctaattatgtgcacgtaacacttattgttgatttgttatcattcatattagttttctggttaaacatagcattatatttgagattagagcgtctccctcttttagatgatggaacaaatgtcgtttgcacttttctatgcttcttgtctacttaaacatagttgattcagagcatataaatggtgatcaataaatcagcgacccaaattcaaacagagctatattgctttttgggcctcctggtactggaaaaaaaagctagcaaaggcaattgcaaatgaagctagtgttcaagtttcattaatgtctcaatgtcaaccttcattcacatcaaaatgctttggagaggatgaaaaaaacattggagctctgttcacactgcctggtaaggttgatagtatgattggacagaggactagaataggagagcatgaggccatgaggaagagaatgaaagacatgctagctattaaacaacttcttctactcttttaagtttgacatctccatccatgcaaacattggtatgagctgaagatctaactaaatatatgttgcaatatgttaggaaaagaagcaaagagaagcagaaggccaaagctccgaagatgcttcaaacaataaagacaaggaagaacaagaaattaaagcgaggcctttaaacatggaagacatgagacaggctaagagtcaggtagggtgaactttaaatttcattcaaatggatatggagtacttgatttgggcatttgtacaatactgcatgaactagtcaaaagtggatttttaaaatctagaaatttaaaaacgttggttcaattgaatacggtaatagatatatggcactagggtcatctgatccattttttttccacttaaaatggtaacttgtaaccaaagatttcatactaaatatcacacgagtggaagaaggaaagtgttatttgcaatagaatatcttttcccatctacatgaacttccgtatatgcaggtggatgcaagttttgcgtcagaaggatccgtaatgaatgagttaaagcagtgataacaatagctgactcacttcctttagattgtggaatgctactttattattggatttgttacaattcatcttcaatgatacgtttcaacaaaggaaggagtccttcaccagagatgttgaactcaaagcatgcctaaatgtctcactatatcccaaatgtcacggagatatcatgattcccatgccagaaaagcacaagttctgcaacatgcatctattatctaaaggacgtgtagatcattatgcactatgttttggaatgggttcttggttttcgtttgagttgtctacaaacaaatgcgcacctgtattaggggattcatgttatgtcatgcatggttttggaagatgcaatggctttgtaggaagtaggaatattttacaccaaacattttaggtgtgctgtattatatatgacagtagaattttgtaaattgaattgtctttaaactgtactgcttttacagttgtgcaactgaaattatttttctttaaatcgaactagttgaatgctattggaattgaaagaaactctgaatttaaatttgtaatgaagttagatattaaaaagaaattaaaatgaattagctagaaatttagtcaactgatttaaattctttcgcaaataatgaaggaaggttatgttttgatttttgggattgtttaagtaaccacctaacttccacctaatccaaacaactgtgctcgaatctaagatcatttttggctaaagtacttcaagttcaattccttgacaatgaacctttttaatatcatacaaaaataactagatcacaattccaattggctccctcaagcccgaaaattagcaacccattattaactcaaaatatataagacataagatcccttagtcatccacttttaaagaaaataataaatctagaaaaggcttcctttattctctctccaaatccaaccgtgagagatctctttgcattttccacatcaacaagctggcacctataatccagattttttctcccaaaaattaagatatccttcaaaagtattcctcaaatagatataataagagaatgaagaaaatatgaaatcccaagaaaattataaagactaaaagcttaagaaatagacaatcaaacttatgctcaatttgacactaaataacttccaaggagaaaaatgatatataaaaaaggaagaaaaataaacattattcgtatgtagttttgcgatcagaaaataagtaaaagttgtatagcctactccgctacttaagttttattaccatcattgtttattacatttatttaactaatacgaaatgatataaaattaaatatattaatattaatggatgtcattttaaaactctagtaattgaagttaataataataaaattctttcaacgcattatatactttttaaacaaatcatttatccaaaaatgataatcttacgttattaatataatcataaatgatttgtagttttaaaagacattttgagataagaaaatatcaagatttagattggagatctttcctcgaatatatatatatatatatgcacattcaagcatcctatcattattgactattaattagaaattaatattttataaacaatttaatctatatttcagaaatgtaataaaattattccttgttcatttttttatacagggatgttcatcttttgttatggaataaatcaagaaatatgaaacctcgtaaaagtggtggaatgggaccatcaaattgatttgattcaagatagctaaagtcctttgggaaatgtctgacctaacttgcaagatctcaatcctatctaattcaattgaaaacatgggtcccagttttggctaaattccagagccaatgagttatcagataaagcgtttgaactcaaatctagttgttctaggcgagctggaaatccaacatcttcagaaattgtcccatttagcttgttcctgtaaaggtacaatcttcttaaagatgggaacactgagagagtgtttggaagagtgccatttgattcatgcccaaatctaattcttccaatgagtatccaatatatctagataagttatggattatcagtggaggatctccactcaaactgatattggatagcatcagtgagagcaaataacttgcattttgaagtgattttggaactccaccctttaattgattccctgataggaccaatgtttccaacttcaaaaaacattaagaattcaggcagtatgccgtggattttattccaacctagattcagttcttgctatgagtatctaggacactcagacaagttattgaatatcactgtcagttcttcactaaacttgttaccagaaatatccaatgacaacattgttttcactagatcctctgtttttgaataataaattgtgacctttttggaatctttttttagaacatcgttttcactcattcaaatttttgagaataggacgcagtaacatttttgttgtaaaagtgaaaacaaaaaatcctcacttgctcacaacaaaatttgagtatattttgttcctctccacagaatttcccaagacgctagaggcacttacatctcaatcaggggaatgatacccctgctgccagctctagtgaatcaccatcaaaggcatgatttccactcacattagagctttggtttctcaatttgagtatatttttattttctttgtattgaactgtttgcgtgtagcagtttcagactcgaagcaaaaaaatgggcttctaaataacatgaatggtatggaataacaagaatttcttgtttcactttacaagcacatattaagcacatattatgcatgaaatgacttagttcacagatccatgattagtaatattcagaatttctgtttgatctattcaaatttccccatcctatataattaacacattagttcaggttcctagtttctagattaggtcaagtatacatctatcacaacatcaaatgagtagtcacaatattaacttttcacaattatacttgttcagacatctccccgctcttaacactttaaaatgatcataaggagtcatgtaaggagtttttagaaatcctgcattctatcctcgggttatgtaacttcagcattttctttgggttatattttgattgatgaaaaggagcaaaatataatacttagttccattgtttttttttttttagatcaccaagttccatcgttacactgatgaaagggacatatttgaattgcatcaaaatgtttttaacttggttactaatagtgcactatagtgatacagagtagctgtggcccgttacagaatttgaatgttgtgtttttgaatagtggtcataatactgtgaattttcataaaatctacttttgcctttaaaataacatcgttttaggtgcagtggttgcaatcttgagattttccttggttttaaaattaaagacattccaaaataagaaataatttaaagttaaaattatccaatgtaatatggataccaaatgaagatattttgtttattattagtatagattaataattaataatatagattattattattgtttctttcttaaaaaacatagtttgaaaattggagtgatctccatataattgaaacatatggtgtcaagttatgaaaaaatgattatgatagattcattcattcaaaatatgtggaagaaatattttaatttttttattcttaaaaaattaaaaatgaggcccttatcaaatgtttaactcaataatatttttgtcaaaccgaaattttgattaagagaaagatgcaggtaaattattaatataatacattgtaatttatatttcattacaaacataatgctaataaaactagagtcttgttaaaaatatcaaaacatgatataagtatctcaattgacactgaagaaatgtaaaacaatcatactttctaacttattgtcttttccaagcattaaaaagctaatacattggagtcatccaagagggctagtgtagggactgaaaattaaaataaaataaaaaagaaagaaggaaagaaaataaaaatagaatgttagtttccaaaatgtgtaaatgaaaataaataaaattcttatacctataaaaagaaatttctagaaattgaagtaataagaataataacataaagttaatgataaattaaaatcacaatagtttataagaaaaacatttatagtaataatggagatcaccaatatttttggattaagtattgaacatcaataattattaatttaatgattatataatgaaaatatagtttaatactattaactaattttaattaatttttataaaacttcacaaacttatcatattcacattaataaatatataattgaatgacaatataaaataatttaatattgttaatacacaacttattttctctaattatatctctattttattttattatcatgaaaacttttcatccaaattttttaaagattacataggattagtttttgatcagtttaagatcagtttttgctgcagtaattcacattcaattccttggcaatgaatccttttaatctcgtataacttaattccttaaatgaaatcatgagactaagtacaaaagcacaacaaaattcctagatcaaacacagtttactatttctacataatcaaagagcatgacccaaaaatcaagaaacaataaccaaacatctcaattctcattattgtgaagattcatcaacttcatacaaaacaaccagttcagatttaagggctaaagttacaacaaaatgcttagaaattaaaaaggaaaataaactagatcacaatcacaattggctccctcaagctctagaagccttccctaattctctctcagtctccaaatccaactgtgagagatgccttctcacctccaaaactatctctttgcattttccacctccacaagctggcacctagaattcagaatttttctgtcaaaaattaaaatatcgatccttcaaaatttgtcctcaactagaagtaataaaagaataaagaaaaaattgaaatgccaagaaaaccaccatgactaaaagctatataaagatgtagaaaatgagatagaaaaactacctcaaacttattttctatttaataacttacgaggaaaaagatatatcaagaaaaaaaatatataatttatattgagttattatttagcgattagaaaataggttaaattatattaatttgtttaatatgaaatgttagtgtaaagaagttttataacctacataacaatcatcattcctttaatttatttaactaataccccgaaatgacatgaaaataaataaaattaaatatattaaactagttcattcaaagatatatcatatatgttctagctagtcttcttttagtgaagaattcaggcagtatgccgtggattttattccaacctagattcagttcttgctatgagtatctaggacactcagacaagttattgaatatcactgtcagttcttcactaaacttgttaccagaaatatccaatgacaacattattttcactagatcctctgtttttgaataataaattgtgacctttttggaatcttttttgagaacatcgttttcactcattcaaatttttgagaataggacgcagtaacatttttgtattaaaagtgaaaacaaaaaatcctcacttgctcacaacaaaatttgagtatattttgttcctatccacaacttgtttacctacggtgtaatagtaaactaaggttcgtgttgatgaataattgttttttttattaattgaggatctaaaggttaaaacaaaagagaaaaacgccatctagttgtaaacaatggtttgtgactgctatttatcatataaaggaaaatgaagtatatatacgaagactaaaatattattaccagctatcctctgtgacgccacttggaaactttcactgctaccatgacataaatagcgtctgataaattgcttatgaacttgaaataagcatgtctccaagaacgctttattaagattgagccaaagacgccccataagcttataacaaatccaattgccatactcatgtaaaattcacgggtgaagagcaatttttcatcttcaggaagtttaacaattggttcctgtgcaggcttcccatcaatacacaatttctctagtggcggtccacaaagatcaagattatcttcataacatgaggcattgaaactctgtaattgtgtaccagttggaatttctccagatagattgttatgtgacaaatctaacacgccgagtcgatcaatttgagtaagactccatggaattgaaccaacaagatggtttcttgacaaatcaagaaagtcaagtgatgttaactttccaatatttgaaggaatcgctccggtcaaatggtttcttgataaattcaatgaaaccaatccaaataaattctctatttccagtggaatttctccagaaaagtgattgcttgagagatcaatgctttttagaagtagtaacccattatttttgaacatttgttctgaacctttccacatcaagaatgcattcaaataatatgtttgattaccaaccaagagattggtattgacataatatgaatgaccttgtgaagatgtcttttgagtcattgaagtaaaatattttatgcatttaggaatttgcccagacatgctgtttagtgatacatccaagagttgaatgtcacttaggtagcaaatttgcaatggtaaacttccatggaaattatttcttcccaaacataaaaattgcaacacttgtaattcgctcccaatccaagcagggataagccctgataatctgttttctgcaatatctagcattactagctttttgcaactcctcaaggagaaaggtatcttatctgttaagttgttgtttctcaatagcaatgcttgaagctgaagaagagatcccatggatttgggtatccttcctgaaaaattattgtgacttaagtccaaataagttaatgacttgaaatggctccaacagtccggaatttttccagagaaatgattatttgaaaggtctaattcgtacaaagtttcaactgtaccattagcacataaaaatgaaagagaatctgagaattgatttttggataaatcaagaaatagggaacctcgcagaaatggtggaacagggccatcaaattgatttggtccaagaattagagaatattgaatattctttgttggaaaattaggaattataccatggagattattgtatgaaatattcattgaaatcgattctcggaatgctaaattagcccaaaaccactttggaaccatatctgctattccagcatttgaaatgtcaatatactcaaattgattttgtgtctccaaccatttgggaaatactggacctagcttgcacgatcgcaatcctatgtacgtcaactgaaatggtgggacccaattttggctaaatgccaaggtcactaaagagttgtcagataactccaagtagtttaactttgacatattagcgaaatgatagtcagtgagcacaccctttaaggaatttgattgcatatctagttgctccagttgaggtggaaatttataatctttaggaatctctccatttaacttgtttccgtcaagatataatttttttaaagatgagaatattgagaggtctggtagtgtgccattgatttgattcatgcctagatctaatttttccaatgaatatctagcacatccagacaagtgatggattatcattggaaactcttcactcaagctattattagacatgtccaatgagcgcaaagcacatgcattcccaaatgatttgggaattccaccttctaaagagtttgatccaattgacaaagactccaacagagatggcaatttggtactctctggaatttttccatttaattgatttcgtgaaagatccaatgttttcaaggcagagaatattgaaaggtcagaaagcgtaccattgatttgatttcctcttatgttcaattcttgcagcgagaatctggcacacccagacaattgatgaattatcaccgaaagctctttattcaaattgttaccagacatatccagtgatctcaaagcacatgagttcccaaatgatttgggaattccaccttctaaagagtttgattggattgacagagattccaaatgaaacggtaagcggatgccttcaggtatctttccccttaattgattttgatcaagaaacaatgatcttagagatgagaatactgaaaggtcgggtaaagagccagtgatttgattatattgaaaatccaattcttgtaatgattgtttaacacaaccactagacaaattatgaaggattgatggaaggtcttcagtcaaatggtttgctggcatgtataaagaatgtaaggtgcatatattcgcgaaggatttcaaatcctcacccttgaatatattatatgagaggtcgaggtgctcaagagaattcattacacggccaaaatggtttgatgtggaaccctccaagaggttatcactaaggtcaagctcaacaaggttggaagtgacgttggacagccactggagtatcattgatgacgtgaagctgttgatggaaagatcaaggacggaaagggaactagaaaaattgaatttagagggcctcaatggaaggataaactgatcggaaaggctacaatgaattaaactcagttctctaagttttggtagcttggcaatcatttggaggaagctatgagaagtgttgagattagatatggagtggaaggaaagatgggctaaggaaatgagattagacagccaatgatctccatcgtcaattttgagagcacgaccatcatctgttcctccaagataaagcttgtgcaaatttgaaaggttcccaagttgggacggtatacttccttcaaaagaattgtagctgagatcaagatgctgcaactggtagagatttccaatctgagagggtatatttccttcaaatcgattgacgctgagatcaagatgctgcaactgggagagatttccaatttgagagggtatatttccttcaaaagaattgtagctgagatcaagatgatgcaactgggagagatttccaagttgacgtgggattgaaccctccagataataattcccagcaagatttaagtgtttcaaatgagaaagagagccaaactgagttggaatttttccttcaaaatgagaaaatgacagatcaaggtatctcaagttggtgagagaaccaagaaactcagggattcctctgccttgaaaagaattccaactgaggtttaaatactttaattgttgcaactccatcaacgatttgtggatctctcctctgatgaaacgttgcgagacaattccagtgaaatgattgaaggcatatgaataattaacctgaccgtgaaggtcaagcattagaacatggccggtgaggttggtgcagcgaatcccttgccattggcagcaatcagaagtggtccaagaagagagcatgccatagggatccacaagtgcagccttgaattggaggagtgcttccctctcagtctgaatgcacataatatggtcttgagcagaaacaacaacctgcaacatcatcatcataaatgttattatggcttgcatgaatttgaaacgaactggattaatggttggcattttggtggttatgatgagaaaggcaaagtgattgatgaaatgaatccactgaatatgagaattagaatgatactgatgactttagcactgccaatagccatacatatatataacatatggatggttaatggaacacacatttctcaacagttgggccactcataatttcttccaagtatccaagtcttcttcgctaccccatcagtctcaacagtcattttcatagctttttatatgaaatattttaccatttctaagatagaagcttgctagattttttcaagaccctaaatcaatttatcttttctatatctaacttttttttaatcatttctactgattattcatcatttaaattttatatttatagtaatttacttttgatcaaattttgttatatattaaatttctttctgtgttaattgcatttatatttatttttttattattttgtattctttttttattcgttcatttttatatttaacctatttacataaaaatacatttatttttttacttataataaataacagtcaaaacaaaagtgttagatattcatacttttaatataaaaaaaatccttttaggatatttaatttttaaaaaattgtgatacacgaatcaaacaaaaaacagctcttaaataaaatttacgaaattagttaaaagaattttgtattacctctaaatttactaatataaatttaacgtaagtatgtaaaatttcttttgacccaaatagtttgattagttatgttgattttataattatttctttcccttttaaaaaaaaatatcagctccttttatattattgatattatacatgttatattctatatatttatgttataaatataaaataaaaagaagtaggtattagggcgtttctaaaatataagcaagtagatatttatgttttattttcatctaatgtttcatctatcaattaacaatattttaagttatcgtcctaaacacaacctaaatctatgatgacaaatactaggagcaagattttgtacactaattacttgacctatatttcgttatgcatttcgattgaattattttcagtttaaagatgctaaaatgtatttaatctagaatatatattttcttatgagtaaaagtcacgataaccacacagcaccggcacaattcctacatagtttccactttttttttatttttcaatttaatatataaccaattaaataaaaaaagacttaaaaaataatgtagcattctaaactatatatatcaaggggggacttgaaaaagtctccggtcaacaagttacaaaaaagttgatcgtatatcgtaaggcaatttcatatttaaaataattagaaaaataataagcacaaaatttgtaatttatgaaaacaaaaaactgcactttgaaaaaaaaacttttaaaaagattaactcatccgcaacttttgcactttatttggattagagatgaaatagaaaaaaaatgagagaaaaaaaaaagatagaaataaaagaggaacgaggtggaaattttatattttttggataaataaatatgaaaaaaatgagtgaattttatattatttaggaatcctcccataaaattaatattgcttcaaacaaaatcctcccatttcaccactgtttttgaggaatcaaattttttttggactccactaaatttgttttacttcattttcatttccatcccatctaaaccaaaagttttcatttcactttctttcacttcttcccaatttattttcatccaaatcatcctaaacaacaagaagaggacttcaaattatatgtaattgacattaaaatcataccgtgcttgaagtggcattcaaattgggtttagttagaaaaagtggccatgttcttaatgatgaacggaaaattaggtttaaaaatgtatatcatgcttgaagaggacatttaaatttaccctagatatcaatagacccataaataattttttattaaagtgaccatgttcttaaggaagacgatattatatatatatgctcttaagaaaaggaagaagagaatattgaggaaaaaattaaaatattcaataaattaaaacagttcaattcacaccaaaaatcaatactttctgaaatttttaaaattcttaattggctataatttcattattactatacatcaatatatcaaatatgaaatatagaataaatttctttattaattcaataatggtataataaatgtttaatatcaattttatatttgtcatatatattagccaaaatatgtaatccttaatataagaaaaaaaaatacaatggcactttcaagggatgacttggaaaaatatatagtcaacctgtcatggaaataatatatgattcaccaatatagttaatagaaaatcatacttaaatgataatgacattcaaaaattataaaaagccaccatattctacacgaaataaagtatatggtgagtttttttttttttgtgtgtgtgtggagaaagattgaaaataaagtttattttgtgttttatttatttaagtggagatgagttatattgagacctcaagagaaagtcctaaatgaggataaataataacaattgttggattaaaattaaaaataatatattattgagattaaaacttaagtataaatatataatataatatcattattgttattattattattgtcatcattatttatgttgttattgtcattattattattactataaactagcttctaattttgttattatagttgttgttgtagtcactactattaaaatttaatggtttaacctttacatatatgatgcttcaaccttgaagaccaaaagcaaggagatagataatcagaaaatatgatggttcaacttctaattcaatcccaagcattatgaacccagaaaacaatgaaaaaaaacatgagaatggtctattctaaaaaataaaaaatgacatgaaatttaattaaaataagaataaaaatttaagggaattgaaattcattgaaatcaaatgagatttgatttgccattttcacacacatgcaaataagaaaacacaaacgaacctatgacaatttgctgagatgaacgaacgaactggtacctcttcatctatgagtcttcctcccttggatttcgctgaaatgtgtttctttctatttggttgattaaacaactctacaaacatgcggatttctttagagatgtttagtaatactacctccagttatgtatatataaaacaaaaggcaatacattttttgggttttaattataagaatcacaagattacttcattactatatctgcaatagtatataattcgtaagacaatatttattgatcttcatatcttgcactaaaaaaaatcctaagtcttaaaacccctttcttttctttttttaacctgccttgacatttttttttttggaaatatatatacaccttaatctctgaggaattacaaattgagtacgtagttcatattaatattttgcttgtggactaatatctgacccataagacttatcatagttacatcatttgcagttctattaagtttcagggtggaatttttgctttacgaggtactaatacatctgtgctattatttttctagaacatacttctgagttactatatgaaagcaaagataaaactgtgcaaactatctagctgtgaagttagggtgaatcactttacaagtggtgcacaactgaaccgctaaaatatacaattaaatataataaattttaatcaacagtcagatttatttaccagttatatgttggattcagaatatgttaatttgaaaatagtccttatatttaacaaattaaaaaataccaagagagacctatgtggtgtctgaatttttttgttttcattttaattttaattcataacagagcttcctcaagtattttaatttcctttacagcatcttccgcaacaacttctaaatcctctcatccatttgtgtagctttccaaaatgttctgtgaatatatatcttcatcttgaataaatttattggctttccaaaaaaagaattggaaattaatttttgttaagtgacaagctcttatatgactttccggaaacaaaacaaagaaagacttgagaagcactccaatcaaaatcacattacataaaacaatcaagtatggaaatttttataaagtaatatatatgatccttacacgacttcattagaacaaaacaaagaaagacttagaaaatactccagtcatcgcactacctacaaaaataatagatgtggaaaattttcttaagtgacatgacgatttatatgactatgtaagaacaaaacagaaagacttagaattataagattccagtcaatgggctaaacagtaaatgtggaaaaaattgtgaagtgacatagccttaaatagactttgtacgtaggaacaaaacaaaaagacgtagaaaattcgcaagacattgataaaggtttaactatttttttagtttttgtaatttaatgtttttttttttgtatttccgttctagtaaaaaaattgtttttaattattgtaaattatatttattttatttttagtccttgaagtaatttagagaatacttttaacaatgaaaaatattatctgaaatgctagaaggacaagaaacaaaacaaacataatttataagcttaatgttaatttcttgataagtataccaatttttcaaagttatattaaacgatagaatcgaatgtcgaatctacatggattatggttgtgtttagaatttgtgtatatcgaattttaagcaaaatgactaaagcaaatatatttcatttcagaattaaagcacagaaatgtaaattttaacaatagtaaatgaaataaaaacaaagcaaggtgcaagaaacaagaaaaaaaaaaacacttaggtgtacaagatgatatttagtgcagatatttttagaagtgttggttgtttggtctaccgaaaatgttcgtgatgtatgtttataatttttcatcatttaaaattatttcaactattatctttgtcaattaaactactataatcattatttctcatgtgaaagagcctaaattatttaacttcacttgaactccttaaagaattaagcaaggtaacttcctttaagaacatagatgcataaataagactaaataacatcatttcgtcatttaacaagggttacttaaaagtctcttcctgttcttagagtaaaaacttttttcaatggttaaaatcttataacatacaggtaaatggtaatcaatccataatcaagacaataaacacataaaggaagtgataatattgaactaacattaaattgatagtagaaatcattacatcaaagagtcattagtacccaagccatcaatatgggaaggctagcctctcatagtcacgagagactcaaaacaagaagataaaacaaagaattggaagaaaatgaaagaaaagaactcccaaagtggatgttttttgttcaaagcatgctctaaacgaacttcctccaaaaagcattttttttaaaaaatccttcaaaacacaacactattatgttttttgaaaaatcattatgtgctaagcctatatatgtgcgctgagcacacatcatagtgcatcaggcttaagagacaacacttaagtactttttataacattttttttttactacatgtaatttttttatttttagtcatgataaattatttttgttttatttttagtccttaaaatactttaaataacactttaaacattaaaaaaaaggtgttataaaaacaaacataatttataaaaactaaaaaaattaataaattgtgataattaaaaagatatttaatttaacaataaatgagtatttttttatttaaactatggagttgaactccaatattaaaagtttacaacaattgagattcatctataactctttattataaatgactaaacttggcatttcatacatcatgtataaagaaaaattattgcaccaattactatttcatttaattagaatatattgataatgaaattttttagcttaattacctaattggtcactttatttattagaaatagtcctcttgtttttggactatgcaattaagtcaactaacatgttagtgcccaagtaacattagactctatctctttaaacttaatggagaaaaaagacaacactaaagataattggtgagattttctataaaaaaaaatcaatcatcactaaaattaataaatactatcaggtttgtaaatttatccatgaataaataaacaaaattaattataattaatcaaatcaatataaaggaaagactaataaaatcatttgattgaaaatgtgatcacttataacctttaaactaataataatatattctgaaagtaaactattaaaaaaataaaataatttatattcaaattttaaaaacaagaaaaaaatgcaactatcttaacaacagacactataaaaacagaaataaacatttattgaacaaaaaatatcattatcattatcattgtaataaataatataaaaagatgataaaatagaaatttaatgatcatttgtaaaatattgtttaatcataattcaaattaatataatttttattttatatatatatatatatatatatatatatatatatatatatatataaaatagattgtgattgaatgacgatctagatttttttacataattaatgtataatcttttttatcataaagtatttagtcaaaagtaaaaaataacactcctcatataaaataatatcttaatattaaaatctatctatatgctatataaaaaatgttgtagaaaataaaattgacatgtgactctgtctcaagagttccataaaataaattattttcaaataaaaaattaggagattaacattctcaaaataaactaatttgattgaaatattcatttattatgtaatctaaataatgatggtcaaaatttattgatgtcataattataatgattaacaattattataattgtcagtattaattataaaggaattgcaatccaattatataagttaatgacatatcatcatgaaaataaaataatcagtataaaaagagagcataggatttagtaagatatacaatgctgcctcatttttgcattcgcttcaattcgtgtctgcatccacttaacctcattcttggagggaattactgatttgtattttatatctattttatatgttttctctaattttttcgagtacattatgagttaagtttattttttctttttaccaatgtgggttgtaccatcttcctaacactatttttttcccattattattgatactgtttcatttgcctttgttcttgattgcttctaaatgtccatgttcttcttctaaagtcttttttttttttttttttacttcatgctcttctaaactcttgagatgaagtgggttgataaagcattgtgttcttaagtttatttggttagatattacttttttttcattgtattttttttaagagaaattgttagttggctcctattttatttttttttcgtttatgctttgaatgtgcttatagaactttgatttgcaccagttatttcttattttcatttgtttgttttagggagcacacaaaattataacgttgatttttgtgtgtgtgtgttgatttatgttgtttcctttatccctattcttcaaatatattcttccttttggccactctcatcatcaccatcgccaatggccttgatttcatatatgggcaccattgccttcacctatgccatccttaatggcaagtgcatcttccaccatacattgacttcacctttggggatgcagaatgagacaaatagtgcatgtcttcaactttgatgatggttgtgtccctcgctagaggaagggttattgcatagacgaagcggcgacggtagcaaggaaagattattaaagaaatttgctgccgaaaatggtctccgacaacgatgagtggtgactgattggtttgttggcagaggactggggaagaataaacctagatttatttaataaaccaaaaacctatattattaaaaaacaaagttgcctcattcaaaagaaaaaaacaaacaaaacatggttaccattttaatttgtgattctcgttctatcgtttttattctcatatacctctttatcgttcccttgttggcacgtatcaattctattattccctccattccaaaacaaatatagttctaggttattttattaaaaaaattaatagataaatgaataatcattttataaaattgacgttaatattaatattacattgaaaaattagaataataatattgatgaaaaaacaggtcactataataacaaactcaataatagaataatagacatcaaaaatgaattttctcaaacaacagggggtgaagcactaatctccattttcaaatatcgttttgacaatcttgaggtatcatgtgtgtaaaatctattgtccaacaattagtgattcaacgatgaacaaatttgtaattgtaatatgaaaaacactttttggtgagtgtgcgaaaatcacgatgatttttctctcctttctctctcaatatttttataactgtttttctctcaaatgagtctatctcatacactttaatttgatcctctctacttaaataaatgagacaaaatgaagcttttcatttaaacttttactttacataggaaaagagtccaaaaaatctaacaaatattaataaaaaaactaatattaaatagtctaatatcacatttattttaaaatattttttcttttaaataccacacttattttggatgaaggtagcattatgttttcctctttcctctccctctaattctccttgtgcaacatgtgttcttctcctcactcataggctacatcttaggcccattaccatttccctgtatcctctttcctttcttctgtacacttgcataatgggcctactattttctcagaaaatttctgagatcatttgggcaagaacttctcagggtacgtaggaagtattcaactcatgaagttgtttgcattgaagctggacccgtactgggattgttgttgtcgattttcatcgtatggagattattattattataattgactttcatcaaatgtgtagatcatcataagaaaaaagttatctactgtttatactataaatttattaatttttataaaattgttttaaaactgttttacaatatatcattgtcaaaaatatgttttacaaattaaatagctcaaacaagagtgaaacctgagattttttttgttgtttgtacaacgctctaatcagctcaactaataggtctaatatgttacaaaataattaatgtcgttatatgaactattaaaatttctaatatatatctaatgcgcatgtaaatttaaataataaattttgtaacaattaattttgatataataattaatatatttatatacatgaattttacgaaaggacaaaacaggtattgcgcacaattgttgggtgcacgtaggaacgtcccatttaaaatcatggcccgagtgtgtttgagtatgagggcccgagtgtgtttgagtatgaggttgtgctccgcattttcttataggtgtaaaatcattcaaggatgtagaagcaagttgtggtttttcttcaacccacttcaacttaaacttgagagaggttgagatcaatctggaagggatcactatatgattaagttaatttcctttgatcatacttcgttaagatgtcatttgttgcatttattttgtccactaaaagtcgtggtgattaaatgggggcagctcgggtttactagcatgtctacgtactagctagccacttgatgactttatgtccaatgattcaatgaataaaataagaacttggcagttttctactagttagtatatatgggaaggatgataatatatttatgtgtcctacaagggttgttatctgatttccatcttccttgccattatttatggtttttgtttgtatatatgtatgtatttaggtcattgctggattatgggtttgtctattctggaaaattgggccaacttgttgatgttctatcagaggtgtctccttctcctttgacttttagtgccatgaaagtccaaacattatcttgaattgtatatattgtgatgtgattgtgatgagtttctataatttcgtgaaacagcttttgtttttgcttcatatatagtgtaccaatgctttacgagaatagaaattgtacacgttcacctcattttggggtgcacttagaagggaaattaaaacaagaaaggaaaaaaaaattagatgaaatgtaaaatgtgatttgcaatgaaaaataattttaaagagagataaaaagaaaaatataattaaagtgatttatacaactataggaattcttatccctctacttcaaaaaagccttaacatcaggtaaaaaaaagaacctacgagagcacttatacaatatagagcgcaaaatagaaatcaagagcataaaaaagatacaatttgttcaatatagaaaatccctcaatgcaagggtaaaaatcatgagttgtccataccaaagaaataattctactataattaataaaggtataagagagtcttcaataagtgtattgaaatgtgctacaaacagtcaaaccaaaatcaaacaccaatgcttaaaatatataaacaagaagatgaaaacaccaaatgcaaaataggaaatgtgaatcacttatctccttctccagatattgttttgacaatcaaaccggacaatttgaggtatcacgtatgtaaaacctattgtccaaagatcagctcaatccaacgatgaatgaatttgcagttgcaatatgaaaaacattttctagtgggtgtgaaaaaatcacgatgattttttctctcatttctctctcaatgttttataattattttttcctcacaaatgagtttatctcatacaccataatctgactcctctccacttaaataaattagacaaaatgaggtttcttatttgaaaatttactctacataaaaagggaggctagaaaacccaataaatattagtaaaaaaataactaatattcaaatatcatatttattttaaaatattttttcttttaaataccacacttattttggatggaggtagtattatgttttcctctttcctctccctctaattatccttgtgcaacatgttttcttctcctctcatacactcgcgggctacatcttaggcccattaccatttccgtggaccttctttcctttcttctgtacacttgcataatgggcctaccattttctcagaaaatttctgagatcgttttcgcaagaacttctcagggcttagttgtttgcattgaagctgtacccgtactgggattattgttgttgagtttcatcgtacggagattattattatactttcatcaaatgtgtagatcatcataagaaaaaagttatctagtgtttatactataaatttgtcatctaatcacaaattagtaagataaatttattaatttttataaaattgttttaaaactgttatagtatatatcattgttaaactcaataattatttcttcccattgataggattaatttggggtcttgctctgacggcattgttcttatggttcaatgaacccacctttattaataattgatgaagtgttcatactagcatttgatttgactttatgatattaaatagtcggctagttaactaatttgcttgttttgatcttaattagtagaccaccaaggatatcatcacaacagcacattctagaagaacctgttttacatgtaaattgccacgaacatgatattaaatagcattttataaccccgagccaaacttgcacttaaacttgagagaagttgagatcaatctggaagggatcacgtactatatcattaagttaacttcctttgatcatacttcgttaagatgtcatttgttgcatttattttgtccactaaaagttgtggtgattaaatggggggcagctcgggtttactagcatgtctactagctagccacttgatgactttatgtccaatgattcaatgaataaaataataacttggcagttttctactagttagtatatatgggaaggatgataatatatttatgtgtcctacaagggttgttatctgatttccatcttccttgccattatttatggtttttgtttgtatatatctatgtatttaggtcattgctggattatgggtttgtctattctggaaaattgggccaacttgttgatgttctatcagaggtgtctccttctcctttgacttttagtgccattaaagtccaaacattatcttgaattgtatatattgtgatgtgattgtgatgagtttctataatttcgtgaaacagcttttgtttttgcttcatatatactgtaccaatgctttacgagaatagaaattgtacacgttcaccgcattttggggtgcacttagaagggaaattaaaacaagaaaggaaaaaaaattaaattagatgaaatgtaaaatgtgatttgcaatgaaaaataacaataaagagagataaaaagaaaaataaaattaaagtgatttataaaactataagaagtcttatccctctacttcaaaaaagccttaacatcaggtaaaaaaaagaagcttttagcatccattttgaagatgttgaaagattggcattaaaactcaaaacactttcaacataagttaacaaagaaacataaccaaaattgaatttcatcgttaacaggaagctgaacattaagtcatgaataaaaaccacacaaagccaaagccttaataagacattatattgaaccaaaaacctctgcagaatttagatactttggcattctttaataactggttctttcaaaagtttaacattttagtatcaaatggtccaaagatgtgcgcgcgcgtatagaattaatccaaaaagtaggcaaaatgaattacctcgaggatgtacctaaaagcccagatatgatcaccagcctcaatacatacactagctaggaccaacttggtgcacccacgtactacagtatatatatatatataagaaataatgataaaaactgagatcatattcatagacctagcttaaaacaaatcttaaaaattatgtttgatattacttttttggctagagtggaaagcttagattttctgtttgggataccactacaaggactattaataacatatatatatatttttatctaacacttagtaaaaatattattaaagtttaaattatacataatatttaataaaatattacaaaaaatagtaacatttatttatattttttgatatttttaaatgttactaaaagtttttagtaatatttttattaagttttagattaaataaatgtttttaaagatgttgtggaagattaaccttttttcaatctcattgataattgaagccatggaactgtgctaataatataggagagttaaaagttgaagctcgtgcaactaaagcataataaaatttaataacatgacaaagtaaattaacttccaaatcaaaagaaaaaaaaaacacatccgcttcgttcttttcatcttttcctcacaattgattgattaatccacgtggggaacaaaaaaggaaggtaaaaaataatttaatgttagctcagcatctgttttattatggccatttcctctacgaacatgttgaaacaagcataaatccattagaacctatagctagtagaaatcatttcactggggctgaaagaaagtgttatctagccttcaacctgccaaagagaataaaagcttctacaatatgcacttacagttaaatctgagcaatcatgaaacgtcataaaaagaattaaaactaattaattgcaaccgcgggaaatctttccactcaaatacggcttagtttagatgaaaagaaaaaatatcaacttaatttcttttgaataaaaaatattagcaataattaacttttacatgttaaattacgaaaaaggaccgaaagttatgcatgtagctaggaacgtggacccttttcagaactagtcttcatgacagacagagttatgaatgggggcatttgtaattttggaaatacaatcttagatatgaaataaaatgtttcaggataatctgacaggggcactcaagatgttacaaaaacaacttattttcttataagaaaaatcctattttaatctaccattcacaaacatatagcttatttcataaacaacttaaatggaacaaaaaaaaaaaccagctgaaattgagaaaaacaagttatcccaaatatcttaatcatatttaatgagtggctcgatcctacacatatttcttggctaccatatgtccaagaatctttttttccagtaaatatgagcacagcattgttgtctagcctgatgttgcaccctgcccttaaatagatgcaccctcttactcttaatctcacaacacatttcatttcttcattccaagaaaccattcatcaaacaatgaaggacaccatagttctatacccggcaaactcatactaagttactaacccaccaggctgaatagggtgattatggtggagaacatgcatgaaggtggttttggcggtgaatgaggacatagatgggtttgtgagtgggactgagttagggaactcatggactcggacaagggaaaagagagagtggatggaagctcttaacttgttgcgttccaaaggttggttcagctgttaaagcaatagtgataaaaagtctagtggacatttcaaactcatgtaacacttttattcatttaattggagtcaaccatggagactaggtatcacctcccaaaagctgagtatagaattatggaatccttctagactagtcatggtgattcaagagaaagtctgttttttgttttctcctcccctgattcaaagtaattattgggaggaatagcgtgtggagccaaatgttcctcgctaaatttatcgtcgccaatgtgggaagtagcatgcagcgtaaaaattattatatatcatctcataatgtcacgtcacgtacgtattagtgatgttactgtatagtagtagttcattttatgtgatatataactgaattttattaattttttataaattaaaaagctaaactatatataattaatataaatattaattagttgcaataatcatatatagatatatgatagtttcaaattatataatagttttttactttttattttttattttcatcatatcatttattgtatctattatttattattaaaattcttattttaaaagatactactactagtaaatttgcatgtgtctgtgcttgtagaagattgaataattaatgcaaacatgcctttgtgttcccttgaagtggtgtaatgtgatctgtcattgtttgaacccatgcatatgtattgactttaatgatattatttgacttggcagtttgtatagctcgacttcgcaccacagaaaacgggtccccagcaggtaggatttacatatgcttccaaggaggcgaaggacactattaatttaaagaattattcatgagtaaattattactttggtccttaaagttgtgaggtgttcgattttattaaagttgattttacatatttaatttagattaataaattaaaattaatttttctaattttaaaataaatgaaattattgatctagagtgaataaagagtatagctctttataattcattaaaaaataattactaagatttaatatttgtatattttattacatatatttatgcattttagtgtgattaatctaattattaaattttaattaaaaattataattaattatttatctatttaagtaataaataatattacatgtacgtgataatcaaaatgttataatttcaatttttatatttttatcaataatttcacaattatagtttttatttataatttttaattaacaattataatcaaaatgttataaaaaaatttaaaattatacctgtatgttgcaaaatgaataaaaaaaaaagagtgtgtggaaataaaatgtatgacatgtattatgagtattatacatgaggttttaccttcatgagaaaaaagaatgaagcattaaatatgattgtaaattagtaattgcaatagttaatcgtagattttctttaaattcattaatggtaaaattgaaaacaagatatctatctaaattttattggtcattaaagatgggaattgtttaatctcatttttatcttgtgtcaattacacaaatcttatattataaattaaaatataaagggttgttcgaatttacttcattttctcaatttaacattttcaatgcggtagtttagtttgcatagacttgatctcataaattcgtaaataaattagctaagtcagttggctcgcgacaaccactataatcgatggtgtgtgtccaccaaacctaaataaaaatatttaaaacaaactatataagagcgaaaaaaatattttaaaaaagataacatattataaataaataaaaacagtataaaaagataataaattgtcgtagtactttttttagtgtaaattatcttagtcctaactaatattatgttatgatttttagttcttgattatcataaataattaattaatttaatgagtttgaattcagttttattcggacaaaaacatactagtttcttactaacttttattatttgccactcaatttcattataacaaattttatctttatacgtatttattttatagtaaggtattatatgctttaatatttaggatcaattgctaaaatttaattttcttatataaataaataaaaaaaatcactttaaaatagactttactaaaaggacaaagattgagctgatttcactcatttgaagtgtggatccaaatatttttataaatcaaatattataactaaaaggaatataaggaatactttaactcatacataaaaattaggtaggagatacactcaagaacataaattaatcaacaaaactgtacgaactaaaatccaataataaagaacatgtatgactctataaagatgaaaatggaataaaattatcttgtaagataaatagaacatgttacattgtacatatttttttaaggaggtggaggcacaagaagttactccaaccacaaggctattatgacaaaaagaggtaccacattaccacttctaggtaacccaatacaagtgatgagacacccccatccctttcccactccccttgacactccataagattaatacaccacacaagaattatagtaatttgcccatataagaagagaaccgggctgaagctctaactttcatttaaccaaattaattatatatacaaaatccacagcatacctgatgaatatcaccttagttcaaagcaatcatatcagatgactgcatgccatataacaatatgccaactaaaaccataggcatgttgtggtacatctatagttaaaaggacataaattatgttgtactttgttactttttatttttaacgtatggatgtataagcagaaacaattatcagtttggttcatatatatatgtcaaagaagattgacgtgaatttcgttgaaggaaatcatcaaaatagctttaatttctacgttaatttcatggattttgtcaacttatgcattattgaaacgcaaccaattaagatatactaaatatcttcgtcttccgtcaggcaccgattaatatgaaagattattagacggaaaatatacattgagtcctgatttttgggatgtttataagatgtttttggttgtccaaaaaccaggactctctcctaaacgaaatagatctgaggtatattacacggacatgtttaatttgacatgactcatcaaattagtttctaagatatatcatgcaagtttattcgtacgcaatggttccgtggcgtgttctgctgaacttgttccaaatttataactcctaattaattcattcgtatgcttaacaacaacaattaagaaaaaaggaaaattttggtacgatgggacattttttctggtgtagaggcattaatactttaactcttaagagaaagaaatagagaagtaattaaaatagttgattatagtactcctataatatgaaaaaaaaagaggtgaataaaaaaaagtggaacatgtctagatagtaataaatatcacgaccgaattcatattcagaacatcgataatttacaacaacttaactcgtgctcattctttattgagaaagaaattcagttcttatactgaatctcatgcacatttctaaatcattctctcattctcaagttctataccattaatgctccctccatatttctaccaacctattcaatgcaactactgaggatccaccttcagtcattgcttcggtggcactgtttttcattttgaaaatcctctgtctaatctcttttcccctatccgagttcatgagctccttgactcggtcacccaactcggtggaactcactaacccgttattgttctgctccaccgccaaccccaccttcatttcctccaccaaaatcaccctattcagcttctgctccgcgtacaaaggccacgccaccattggaaccccttcacaaatcgcttccaacaccgagttccacccgcagtgagtcacgaacccacccaccgagtcatgactcagaatcgccgcctgtggggcccagtccctcaccaccattcccttctccttagtcctatccaaaaacccttctggtaacaactcctccaaactcggtggctccgccgactcaccctcttcgaactcgctcctcacgacccacagaaacctttgttcactcttctccaacccaatagcaatctctctcaactgagtcctcgagaatcttcccatgcttccaaaactcaaaaacacaacactctgactcggttgcgagtttaaccaactcagacacccgttatcatcctttctacaaggagcagaagaaatcacgggtccaatgcaaaacactttcggcgtggttccttccatcaacccttcgttgaacgcttccaacacactctcttcgatggcttcacacgtgtttactataatcccgtaactgcccctcatgcacgtggctatgtcaaaaaaaaccccgtaagcttcgttttcacgatctttcgctccgtctggcatgtcatcagtgtgaattttcggtaaccctgggattacaacgtgcgtgttgaggtccttgagggacttggtgcaggtttcgtgaaagatggtttgataaagaagagcggcgagggtggaggcgccggaagtgtagtagaagtaagtggggatttgaagcgtgttggtgacacgtgcggcgctgtagttcatgaagtccaagactattgctttgaggtttgaggtttgggagatgtagctgaggatgcggcggaggtggtggccggtggcgcggcagagctcgaaggtgagggccatgggagggaggacggtgaggatggagatctgagggatgcggtggaaggtgatggagggggtggcggcggtgacagcggcgatgtatttggcggtggcgtcgcaggtgaaggcggtgggggaggtgggggtgtcttggttggggggtggggttaggaaaagaatggtgatggaaagtgaagggtggtggcttagtatgagtttacctagttccaccattgaaacaaggtgtcctcttcccaaagctgaatatagaacaatggaatctttcatggtcatgatgattcaagagaaagtctttttttttttccttttttttcttgctcttgctgtggtgattcttaggagggtgaattggtgtggagggaaagtattttgcatggtctatttattagcaactttgggaggtgcaggctacgtacgtgtcttggattatatgtcggctggaatatttcatttagaaaaatgttttgtagggtctcattattatgtggaggagagagagaggaagaaaaaaaggaaaaaattatataaaaaatatttgatcaatactcacaatattatctaacattggagagaaaataaaaaaaatataaaaataataagtatgatagaaaaagagagattaatataaataagaattgttattaaaatatttaaaattagagaatatttatgtattattactcaaaataaatataaatattataaaaattatgatgtaatttaaaaaaataaaagatattaatgaagtctttaaaataagtaagtgtatgtgtaattaatatttttttttaattcttttataagtagaaaatttaagagaattaggtcatgaaagtccaccaaatgatgataaatctcaagattaaataagtgctcaagaaatacttactgtttacatacttctcatgctgtgaaactcacttccttccttgtgagacatgaattaatctcatgattatcagctagatcgacttaatttgttggtttgggaggtatattcttaaactagaagggataaaaaaagtgtaatattttacctatggatatacaaggctgtgtttctagaagttgaatatacgatggttattcaagtcaaggattttatactattatcgcttggagcggtgtggtgtggtaccgtgatatggatgcgttgctatttaaacccacacttattgaaataattatatgtcagtagttgagtcaatataacccacatttattgatttcagaaaaacagtcaaggtgcaccgaatgatatgataagaaattattaaaaaataaaataaaattgggtgaataaaatataagaaaagtttatgcggatgaataaaaatctttgttttagtacgataaattctatggtatatatcttttaaaattaaaagttttggagttgtcatgttattgggacttaatttctttactatatttaaaattcatttgactgttggtctaaaaaaattgagcgtagcaagtttatacaagaaattttcttttaaagaacaatccatatagataaaatattgactgaacataaaaaattatctaaaatattaaacctcctcaacctataattaatgtaatctatattacaatataaattaaaatagtctcaaatttatatgaagatacaatagaaaggttaatgtatattagtatacttgtgatgaaaattaaaaatctataagaaggttgagtaatgtttattttatgcttaattattatacatccatgtatttctggaagattaaatacttaatggctatatatcacttaaaactgtgttcactgggatataattgacgtgatctgttgtttgtcattgtttgaactcatgaattaatatatttattcgctctgtatatattagttggatttaaatgcttcctaaaataatatcaaattcagccttattcaagctttttagtttttaataatttaaataaaattgattatataaatttttatgtcttatttcttcttttttaccacaaaaatggtggattatatttcatcagtagaaaaaaaaaaacaaaaaaattcagtgcatccaattataacaaggacaataagagggttaactaattaagtgggaaactgactttagaaccagggtcatatgtttgcagtctcaattatagcctcaaaataagtctcacctcgtgtcgatttacgtttccttggctgtattgtaaatatgttatttatgtatgcacttgatatttctaatcgtctacgatttttaatttaattatcttttatttcgataattaaaatatattttaataatttttttaataatttcagtaattaaaaatattatattataatttaaattatttataaatctaaaatataatttatatatttaaaaatatttatttattaaaaattttaattacacgaaaataaacatttattatgggtaatgtaaacagtaaaatactccagaatagtatgtcaaggattttagtttttatactcacttttttatatgtatatttttatcaagttatttataagaatttttttctttttctttttctcttttcttgagaaccatatgcttatattggggatattggcatcattgaagcctcagaatatgggtcaacatcacgtaattgaaccgtgccattattttgtaactaatttaatctaaatatcagcagcatttgtcgtagtgcttctgcatgattcatgcctaatgttgacatgcatgggtgaaaggaagaaacgtgtgagagaaagaagaaaaaaaataaaagagagatgatagatatggaaaatgagattaaagataagtctgcaaaatgcaaatatgataaccctgtattattttgtttgaggagtgcgtcatgtatagtatatacttggcttatatgtgtcatctgcaacatgatgtgcgtaagaagcatacaatttttcctttgcatgttactgattgattgcttcggatctattgtttctattctcggtccacatgcagtagcagcatataatttttcctttgcatgctatttcttaatttactgtgcgaaacatctcccttaattaacatgaattttgtaactacaatgctgtcattgcaatgtcatataattagaaaattatttacaatgctgtcattgcacttgcagtacatgacattcacgacgactgttctgagccatatgaacttttggtggtagatacaaaatccagattcatttaaccttgtctaactataatattaagccattgattccaatggtttttccaacgtagaaatatattatattaataaggtagcgtacacctttgcttgggacactgtcgagattttctggaagtagctttgtatactatgtgtagatatatttaattaccaaatgggattttggatgttgtggatttgtacttttgctattggattattcgtccaacaatagggtttttgttttttattcttaaaatatcgaaaccttaaggtctattatttagtatctgactatctgtgttgccatgcattaccagaagtttggcaaagatattatattacttacttgattcatttttgttagttaatataactaaaatatatatgagtgttggattcttattcgtaccatgcagaaatcatatgaatacatttagggcccttattttagtgtgattttaaaataagttacattattatatattatccaatcatataatgtcacttgatttattttatcacataattaagtttaatgttttgattttttgcaattaaaaccaaaggtttattttgcaattaaaacctaagaatctttttacaaatttgatatttttattttaaatttaatgtattttaaaaagatactttaatccataattaattcttaatcttttagattataaacctagccttcccaaaaataattaatcgatgtttgtcaatccaatcaaccaagtgaaataggtcaaaccagcttaaggttacctatatatagttcttgtcaattaatttcaattggaatttgttcaatggttattcctaaacttgtatgacctaggatatggccaaggccacaatgcatctaatagatatagttgcaactagacattattagaaaattatttctctctagcttttgggcataattagtccttctcctttatatttcaatgtcgtgagaattggccttcagaatcatcgcattcacaatcaaaatactttgcttagaaattattcagtggaattaaatctaactttaacataaacacatgttgcaagatgacaaattggatatgacacatctaagactatgaaacaggtttcgcaaataattaagtttgaatttggtatgaaataaacatcaatcactgacctaacaaacaactaggtacatccgggtaaagattgatagaacacaggaaaaattagatctaaaatgaagaagattgagaattaattgaggattaaagtgtctttttaaaatatataaattaaaaataaaaatattaaatttgttaaaagtccttaggttttaattgaaaaaaaaaataaaaaattaaacttgaaagtttgatgatgaaataaatcacataacattatttgatcaaataatatacaacacacatgtgacttattttaaaattacgccaaaataacatgccagcggttcaaccttttttgaagccttctcatgatatcataaatttagggtataaatataagtaaaagaaaatgataaatgtcaaattataaattaaaataatttcaaattcatttaaagatgtatacaattgaaaagttaatataaatttagtatacttaatacttgggatgaaaattataaatctataaggagattatgtttatcttatgcttatgcgtgcatatgcttctagaagattaaatatttaatggctatatcacttaaaactgtgtttacttggattgatgtgatatgtgatttgaatgcttgctaaaatattatcaaattcagcctaattcaatcttgcaagtttttcataataatttaaattaaatttattacatcaacttttgtcttattccttttttttacgacagaaaaggtggattatatttgattagaagacaaaagcatgtacatccaattgtaacaaggaaaatagtttctctattcaaattatctcgtggattgaaatgatagcttaattaaattaactatgaacgaataagagggaaagctgacttgagccagggcaatatatatgttttctgtcctccattatggcatgaaaataagttgcacgtcgtgtaggttacgtttccttgcatgttatttatatgtgatatttgatattctccactgtctatccttttcaatttaatgttttttgcctttatttccaaaataatttttaatagtattactttaaaattttaaaataatattatatcataatttaaattattcattatagatctaaaatataatttatatttaaaaatatttatttataacaaattttaattatttaaaaaacatttattacattcaatgtaaagaataaaatactagttaactgataaattaacattcacccccaccagtatcattcctgaataatgacaaggattttaatgtttatactgtttttttaatactttatcacattatgtattgtaatttttttctttttctttctgtttttggagcacagaatgcttaattatactggagtgactaagaacttttaactcaattaattgaccttgatataattattataaatcttaacattatttttaattcctataataataataaaaaaaataccaggagtgttggcatcattgtagcctcagaatatgggtcaatgactggtaattgaaccgtgccactattttgtaattagcaactgcatttgttggttgcacgtgcttctgcagtcgatctgcacggttcttaatattttaacccatgaaatcaataaaagaaaaatattttaacttaacacatgcatcatgcttgacatagtgcgtattaccaacaaggaaaaagttaattgtgcatcctaattttggaacgagcaggtgaaaggaaaagagaaatagataaataaaataaaatttgagagagaaattatagatgtgacaagtgagtacgttgataacaaataaataaataaataattaaaatgaaaaaaaagagagtgaaggatagaagagaagctgaattccttaggattgttagcttgacatcggaacgagctaataaaactttcctttctggtttgtgctgcatgcaatgcattactgttcttcctgtacatgtctatcattgagaagcatagtgtgtttattgttcttagtcttacattttgttgtagcaaggtttttgattaatcggccatgtcatttgtcattatggttcaacaacatactttctctcctagaaattgtagcaagttgcatttgtcttcatattattggattttatatatatactttcaaacacacacatatatgagatgaggaattgtaacaagctgcattgcatttatctttagtttttttaaaagaagtttgagaattcgatatcaagatgtacatggtttagaaaattatctgcaatgctgtcattgcagtacatgacataaattcacttttactgttctgggccctatgaatttgtggtggtatgtagatccaaattagtttaaccatggccaactataatattaaaccattgattccattggattttccaatgtagaaatacaattaataaggcagaatatatcacctttgataggtactctgtggggtttcatagtaattaagtagcttttgtactatttgtagactataaacactatatatttattttgatggaattggaaccaagtgggattttggatgttgtgaatttgtagcttttctattggattacttttccaatcggttttttgtttttgattttttttatgggatagaaaactgtaggtctttaatttagtatgtatgttgccattaccagaagtttggtaaaaagatagtattacttacatgatgcatttatgttaattaatataacttgaaaatatgagcattgaattattaataggggttgagtataatggaagaaactaatctcacataacttaataaatatttgaatttctgttagaaaaatgtgtcaccatttaaaattcaatcgtattcgaacataattgactctggaaggaaataatatgtgaaaaacaaaaaaaaaaaaatgagcattgaattcttatttaatttgtaccatataccctgcagatcataggaattcgaacaatatttaacagctattcaacttattttgaagcatcctcatggtatcgtatacttgatatatatactttaattttaatccgtaccaacctgtatgcactgatacatggcatctcttcattgttttgcttctcgatagcttcatgcgttctattgatgtcaatataaggcaataatctcgccactaatgacgttatttcttttttcatttgcttgtcatcgtttctcttgccgcacacaaaaaccattaaattaacatattttttaattggttaaatgttaaatagttagttaattattaattttttttataaaattgacttaatgacaaatagagaagaaaaagataaaaaaaaaaagttattgatttgaacttttcgataacgaacaacatatatattcattccgtaattaattaaatacaaaatttatcatatatgtctacctcatgtcaagtgactattggcttttgaaatcaacatgcatatatataaaaatgagaaattgtagcaagttgtttggttaatcagcaatctcattcgtcttttatggttcagaaacgtactttctcttagaggggaattgaagaaaggcgcgtttgtattcacattactgaattttatatactcctatatgcgagatatggtgacaatcttcttttgtctgtgtatattgatatgcccctaatatataaattgttcgtagaagctagttggatattaactagctagaacgtgaaattatttttggcaatgtacgtacttcactactgaactctcatttcaaacagtattttatatttccatctttttttatcttcttgttttatcatatttctaatttcatttaccatttatgtcttacatatatatacatgaagcattaacccgtgtgacaagtgacaatgggtgtttctaataaaagtatcacgtatcattactcctacttatttaatataaaatcaaattattaatgttagtttatttcatttttgtattagggaaagactggaagtaccaaaaatttgagacgattgatgatgcacgagcgaaatgatttatttttttaattttttattgttatttaatcatttatcaattaataacatatctgcacctccatttcatataaattcgtactgaaaattttcctactaaatggaactactctatgtaataattctcccttaatttgcttttagtatttattaattaatttttttagatatttattaatattttttgaattttaaatttcattaatttaatcatagaagtgaattttttataattaataagttgaatttgcaaaattttattttaaaattcgttaatacttcttcacaaaaatttattttccctgtaatatttttatggttgccgacgcctctcacatgctttagttgactaaaacacaattaatctcttcacaaaaatttattttccctgtaatactttataaatgtttaatcaaagtgacatgatagatatgcatatacatgccaaataacattaaataatttgactttgaaacgcttgaaaatgacttggttttttaaagtatgtggcttgttacgttacgttctaataaatgtagatgataaaaaggattgaatataaactaacatcaaatgtcaaaaagtctcttcttttcctttttgctaaatgtcgcggagtctacttttctttcatgtcattatcaatatactttttctttttctttttttattataaaaataaaggtagaaagagtaaactaacatacatcttcaaatattttcataagttttatactttatgataactataaaattaatttttagtttaaaatttaatcactcttaaatttcttattctatccaagagtacgatcgaatactctgatataaaaaatgttacattgaattccaccacaaatagcataattattaaaattttatcaattctaaagatagcccatggccaacacatcgaattaaacttcaaaaaatacatatggggttttcaagtaggcataaaataatactacatgcctcattaattgcatgcactccactaaaagctcatagcggcctaaaagttaacaacaaaattacaaaataaagtaaataacacatccacatgcatgtcaaagtaaaaatatctacttatcaaaatttggaattatttataaactttattcatttaagattttaaaatagaaatctacaaaaaaattgtaaaaaaaaaaggccaaaagccaacactaataagtttgacactaactggattgcgttaattagccaaacaagaccaatgcttactagtgtgagcctgaccatcgtttaaaatgacgcaaaatcgtaaaaattgaacaaaattaaaaaagtattgtcattgtttgcaatttaatgttctccatttttttcccaaaccaccatcgcacgtcgccacccaaaacctaaaactaccacagctacaaacatagagctagctaccactacttacaaaaaagaaaccatcaataggaaaaaaaaaggaaaattcactaccattgcatgcaaccacaccaccaccccaaaacttaaactgccatctctattgccaatatccaccgtctccaaaaccacctacaatacagagaaaagaacctcttcaataagtctaagaaattaaaagaaagcaaacaagaggaaagattgaagatgaaatagagaatataagtgatggccaaaccaacgttaaaaatttacattttttaatattagtagcgccagccaaactaatgcttaaaaacaactttttctaatatattaggaggccgtcgcttccttttaaattttttaaaaatacaaggtgagaatagttctacatttcgggctaagatgaaattttttaagataattagttagcgtcaattaggcaaaacaccaatgttttttttttaatattattagcactgcccatgatcaaggctatcttttaaatttaaaaaactaaatagaaggcaggagtaactttactttttgttagtgtaagcctaagaggctaatactttatggtttacttttgtatcgtgttttgtttgtttattaactatacaagttcggtggataggatttgatcctcttttttaacaagagtaatgtcttaggcctctccatagagtgatacatacaatatatttagctaagtggaaatagatcgatatgtaatattggacctgtttgtaattacacttttactttattaacgaagaattaatttcaccattattttgttaatttgagttgggtttcatgtatgggataattgtccatacaagatttttttttctcaatatgttcaatcacttctaattttactcccataaaagtatttagtattttcctgtaagatattttttttaaaataaattctaaaattataatagataaaagaaaaaaaataaattgatattaattttacctgtttacgtacttttacaatttttttatagaattaaaaatgaaaaaatcatacaacattttaacaatataaaaatgtaaagaacaattatgattggtaaaatcataaatattttgaatttttatgatgttatgaattttgtaaaacttgtaatatttaattttcttctatgcaaatatgataaattatctatttcccctcattaaaaatatatttagatctgtcactatacagggccttggtttatacgtctagcccatataaaaaggatagcccaaaaattaattttaattttttaaatttatttttgtatttatgttatgttattttattaaaataattgtaacagttatctaaagtaattatttgattttaaaattactaaaattaactaatattaatattattatttacttaaaaatattgcttacataatttttctaaaattttggtaggtagttattacattatttaagttgttgccgtcatacagatgttttcatcttttttcatatccaatatctactattatataaattttaccagagttttatttgttttcatcatttttacaattttttgtcctagttatgtaaaaagaattaaaattttatttcagaaaaagtcaagatattataaaaaattttatacaattattgaataaaacatttatataattatttaataaaaatttatcatatataataagtttattaatttctaaaataatagttttaaaataatttaaataatgatttataattaaataataatataaaattattttacaactaacaataaaaattaaatattttatttttttaaaagttttgtaacattccaaacacaattgcacagtcaaacttttgatattttaacctagttacacagtcttgagcacaacaaattaactcgtgctcattctttatcgaggaggaacttcccttctgaactaaatcacacttttcaaagcttaattattctctcacagtaattctctaccaaataaattatgcttagctgcataaacattacattaattagtgctccctccatatatctaccaaccgattcaaagtaacgacagaagatccaccttcagacattgcttcggtggcactgattttcatcttaaaaatcctctgtctaatctccttccctctgtccgagtccatgagttccatcactcggtcccccaactcggtggaactcactaacccgtctttgttctgcttcaccgccaaacccaccttcatttcctccaccaatatcaccctattcagcttctgctccgcgtagagaggccacgccaccattggcacaccttcacacaccgcctccaacaccgagttccacccgcagtgagtcacaaaccctcccaccgagtcatgactcagtatcgccgcctgtggggcccagtccctcaccactaagcccttctccttggtcctctccaaaaacccttctggcaacaactcgtccaagctcggtggctccgccgagtcaccctcttcgaactcgctcctcacgacccacaagaacctttgctcactcttctccaacccaatagcaatctctctcaactgagtcctcgagaatctccccatgcttccgaaactcaagaaaacaacgctgtgactcggttgtgaatcgagccaactcaaacacccgttatcatcgcctctacaaggagccgaaaccaccggtccaatgcaaaacactggtggcgtagttccttccatcaacccttcgttgaacgcttctataaccctactttcgatagcatcaaaggtgtttactataaccccgtaactgtccctcatgcacgtggcaatgtcaataaaaacctggtccttcccttgctctggcaaatcatcggtgtgaattttcggtaaccctggtatgatgagttccttgatggacttggtgttgttttcgtgaatgatgatttgctgaaggaaaacggcgagggtggaggcgccggaagtgtagtagaagtaagtggggatttgaagcgtgttggtgacacgtgcggcactgtagttcatgaagtccaagactattgctttgaggtttgaggtttgggagatggagttgaggatgcggcggaggtggtggccggtggcgcggcagagctcgaagttgagggcatggggatggaggacggtgggaattgagatctgagggatgcggtgaaaggcaatggagggagtggcggcggtgacggcggcgatgtatttggcggtggcgtcgcaggtgaaggcggtgggggaggtgggggtgtcttggttggggggtggggttaggaaaagaatggtgatggaaagtgaagggtggtggcttagtatgagtttacctagttccaccattgaaacaaggtgtcctcttcccaaagctgaatatagaacaatggaatctttcatggtcatgatgattcaagagaaagtctttttttttctttttgccttttctctttctctttctgttctgattctaaggagggtgatttgtgtgtggagggaaagtgtttttcttgctctatttattggcagcgttggaaggtgaatgaagaccgcgtaattaagtgtcttgaattatatgtcggcttggctggtttattttttattttcttataactctgctggtaacacaggttgtgggaaggacatgaattccattattcctattaaatacaatttttttaaggagggttctacgcagaaaggactgaaatttataaaaatatatctcaaaatatattaattaggatggttacaaaatataatattaagccttgtttgatttaatgttaaagaattgatttgagtttaaaattaattttaaatttatttttatttgctgtatcatacatccatgtgcttctagaagagtgaacccacatgttaagggtcttggagtgctgttgactgttgtgtcggcttatactacatgcgatctgtcgctgtttggaccacatgtattgcagagtgccctttcacttgtgatgaaaattaaaaatctataaagagactacgtaatttttattttatgcctatgcatgtgcttcgatctagaagattaagtatataatggcgatatcacttatatactttcacatgtgtatgagacgagaaactctaacaagttacatttatctatgtatttctaaaagggatttgagaattcgatatttacatgtgtttattggaaataatcaaagtctcacatggctaaaagtaatcttatattagagataatttttatctcttgagttagtttttggggttaagttaaattcaaaatttccttttaaagatggtatcagggcccgttctaatcctaagaccacgcttccgctagtccttattttatgatgacaaacactcactatttgttgttcacaccctaagtccagaaagtgtttgacttgagggtgtgtgttgaaaataatttaagtcacacatcgattaaaagtaatcatacattagaagcaacccttacctcttaagttagtttttgaggttaaatttaacctaaaactcactttctaagagtgccgaatcgaagaaaatatgaaacaagtcaagttaataatccagtattaattatctctctatgtagaatgagtatgagtttgcctagtttcaccatgaagactaggtgtccctcctcaaagttgattcaagaggtagtctatcttttcttgtcttttcttttgtctctatctttcctgattcaaaggaggatttgtgtgtgtggagcagcgagccatgcaagttggcaagtgtattggattatcagtgtgtgggtatattttagattaactagaaacaacgagggaagcacgaaatcattattttatgcttatagagttatacatgccgcgtttctagaagattgtatattttatggctattatcactcaagtttgttcacttgaggagagatcagtgatatgccatctgtcatcatttttaacccacatgtattgattttaattttaggttactatataactttggtagtgtttggtttaaatggttgaattagcattattgaaagtaaaatgtgttcagttggaatgaaagtagatgaattgaatatctgttacatatgaaatgaagctgcaagatttgaaagaaaaaaaacctgggctccccatgcttttactttcatctcaaattgtgataaaatggagtgaaagtgaaaagtatacgaaacacaatatatttttatctctattgttaaaattgcccctctcactcaagtggtctaatggcgcctcgttgtagctgataatcatttatacatctacaataatcaataggtgatcaaacaaagggtgccaggttgcaactctcaccaataatcaaatatgtgcaacgtatagacgtttatttctcaataattttggattttgtttcggtctcacctaatcaggaaacatgtttttgtatgggaagtaaatggacatttgtctcatttttttctgactttttctttttcttatttatttattactttaattcaaaactttcctcttatttacactctctttcatttcaatcaaacaacctaacttaacactatctttcccttttccttcatctatttttattccttttcaaacctctagaacaaacatacccttaattgcagattttattaccaaacttatcattatttcataaattttattattaaaattctatttctacacattttactatcatattaataacaaaataatattattttgaaaaaatccggtaagttttttcagtgacactccaacattagaaaaatatgcaaaagctaaaaattttaatagtaaaatttgcagcaaaaatgataaaattcataaaataaaaatactaagcctgactattctattttttattttttatcttttagtaaatattaattattaatttattagtttttattaacagaaaagatttgaatccataacattttacttttcaatttccatttcaactactaactaatcaatcctattagtcaagtcttactactattttgtatacttaattttctgtttcattttacttttctgattctaaaagtgattaatgtgtgcaaggaaataaaagtgtttcttatttaatttatggtcaacgtggtggggaggagtcggctgccactactaaaaaaacaatattttaaggacgcaacctcaaggggaccatagaagtataggagtcattgttttgattgatcatgaagtttcaagagaaagtcgtctttgtattttctttttccattactctcctgattcaaaggcgttgttattagtagcaggctgcgtaagtgtttctgcattaataaattataaactataagggatcaatgaagaagtgatattttattcttatggatatgctgtgcgtgattttttttctggtgattacttttcttctaaagaacaatacatggtagataaagtattaactaaccacaaaatttatctaaaatattacatctcctcataaataatcccatatttatttgaagatacaataaaaataataatataaatttaattaattaactattatacttgtgatgaaaattaaaaatctacgaggacactgagtaatgtttatttcatgcttctagaagattaattaattgtttaatagtcatcacttaaagctgtgtccactcggagtgatatgacgtgtgatttgtcattatttgaacccatatgattcatattaactaattcactttatgatggaaatgcttcctaaaatattattaacttcaatataattcaagcttatttttcataataattaactggtttattaatccttatcacgggtaagtttataatttataaatgtttaatatttttttactttctcatttataaaatatatcttaataaatagtatataaatgtttacttaaattaatacatgttcatggaaaataatgtaaaatttaagaattgtgaaaaatataatatacatgaccaataaatagttctggaccttttttctagaagattttgacctacaatcataatctaaatatattttttgtctcttaaatgtagattacttttattttttacctttcatatttaagtttatttttttagtctctcaattttagaaaattctctttttattcattcaaattcacacattattcaaaggattgcatgcaatttgtaaaatcatggtcatttaggaatatttgggccatgcatctaactagaaaagagatcacattctacttcatcattgttgcaaccgatttatatatttcttacgatggggcatgagagacaatatatataagatatattaaatttttatttcataagttaaacttagtttttacatcttaatctattttaaaaaaattaaatgagttataaaaaaattaaaatatataatttaattttatcttaatgtttattttatttttattgctttatttatgtttttataaactctcgtgaagaattttatttaaaacaacttaagtcgttaaacaacaaacttaaaagtgaactgaacaagtggttttcctatcctatcctattatattacatttgcagcctttgatttttgtatgacaaattgacagccaataaaaatcatttactttccatgcctgactactttgtctttcaacgagcacatgctgctcgtgacactgtaattcatctattggcttcttcattcattattggagtttttttttttctctgtgtaaatttaggcatcatgttatggaagattatgtaagtgtattttcaatggtgctctactgattcaggcattatttttgttcttaattcacttttatgaatgcatcaatactacatcaaatttatctgggaatagtatttccatatgctgggggcagttcgctacatttgaatactctgtatttatctagtcttgtacctacaattatatattttattttgttgactgaaaaaaaatacatcaaattttaaattttttattattttttactttttttgacagattattatttttttaccttgatagtgtaattaaataaaaaaaataaatttcatatgttatttacattttttttagttttgtttctccaattattattggaaagaacctattaaatcttgaagaatttgtgcatcatatggacaagcctttgagaacagtgataatattattgtgtctcaagctacttttgtttgtgatcaaataagttttaaaatattcacaaaaataaaaaaagttttcaaattgaaaatataatagattgtgattagtgagagattcatgtttaatcataatcatggataacaaaaacaacaaatatagagatataagataaatatagtgatgaagggagaagaaaaagataaagagttcataaattctaattttttcaataacaaaaaattaataatactaacatcttatatctgttgataaaataaaatgtctaccaccatgctagtggacaactagggttattggagtaagagttgagtgagaaaaacaatataattgtgaaggatctgagcagaacgactccaggattgtattaaaaggggtaggattttttttacataattttttaaatatttaagttctaataaataataatttttaaagaatatattattaaatttatgaataaaattaaagatataacctactattaaaaaaagtaaacaaacatcaattctaaaacatattatatatatatatatatagatatattttttccttttaatttttctattttttcttatatatacacacaaaggatcaattattggaaagagggagctgagaaaagccaaggctgtgcttgcccccttatgcgacacctacaatggtccaccttaaaatccattatccatcataaagttagtatagtttgggaagatgctccttatttttgtatgccagtagtactaaactactcaatttgtccgttattagacggacattaattagcaagtgttgttaaagaagttcggctaactagtaactaataatgtataagcttatgagattttttgtttggaatattttttatctttaatctttatttttatgtgaaaggtaaaaattcacaaatacataatttaggataattcacaaaaagtcataggatttataatatattcaattgttaaggataaataaaatatcagaatccataattgatttctgatttcttatctaagtattttttttatatttgttgtaagatttttacgattatcaatcacaattataaataatgatattataattctttctcaaccaaaatatctttattctttaatgagactttcgtaattattcttatacgaaaaagaaaaattatgttactcgtcataacatagaatggaatcatgttaatttacaaaccacttgcacttatgtgtattgtggtatatactaatattgtatccaaatcaatatttcattgatcttgtatcaacaataaatcatatagtcaataacaaaaatcattcctaatatataacatgtttacaaatatttgcatgtctcattatatatatatataatgagacatgcaaatatatcaaataataaatcatcacaagatattcagcacaacattaattcttagtctttgaatagaaaaattaatttgtaattagtactctcaaaatcaaatattaacaattagttgtgtcaaataataatccttctttggactcaccattattcatatgataatatttattattgtcacgtaattatcatcacatgtatgttattatttggtcaaattgtgtctttctttaagcagaacacaatttacaaaaataatctcatacaaatatctatgtaattttaataaaattaatttttacaatataaattattttgatgatatattgtgttgatcaatttaatttaccagacatataaataaatggaaagaattcgtagctactaaatttgcacctaatgatagcaataaatatagaaatattaatcacaacaagtaaatattatattcttaaattatatttaagtttataattaatttacacttaaattacggcaaataaatatcacatccataaataattttatcacgctatattaaatttatatcataaatgaaagatagatgaaaaataatttttggatacattcataaagtattataaaattgatttatttatacaaagacaaaaaataactaacttgagtaactaacaataacttaagtaacttacttaaataacttttctagtaatcaactccaattatttaatcgtgataatttattataacatcaccgatttcatatatcaaggaagcacaaagacacatattcttaaaaaaaaaattggcatgtacatagcatcaaggcaattacatcaaaaggatttccaatgacacataatgttttatatagaaaaatttgaatcctaacaatcaaacaaggaagacatgctctaatatcatttcttgaaatatttttaatatttattttttattcaaaaactaaaaattcacatgtttataatctaggacaatttatcaaaattcttatgatctataatacgttctttgacatttgttataatatctttaccgttatcaatcacaataacaaaaacattatagttttttttcaattagaatctctttatttttcaatgaaatttttgtaaatctataattaattaaaaaagaaactttatatttccattatcccctaataaatcgatattatttatttaaattcatatcattttatttaatttttaatctgattcatttaatttaatctaataacataaaataaaagccattaataataaataatacattaattattgaaataacaaagttcaaccccctttctttctagatgcgcgagttattggacacgattctatagtcagtgtcatatgtaagattcataattgaggttgaagaaaggtcagaatgagttgccaatttttctgacgctgatccacttctattctatcatattgtgatataaaattaaactattataacattgtttcccttatatatcagaagtaacaatgtttaaaaaaagaacaatcttaggttcgtattttacctcgatttggtatctacgtgtagttaccgttacattcagatataatgttattttcaagggggaaaaaagaagagattttggcgtcctttttttacagaattaagaaagcaagtcccaatattatacatttataagcaattcataatatcgtttcacgattaaaacagttcttagtacgatgaatttaattaactctgcttgatttgattttgtaattgtataagtttgcattaaaaaaaaaaacaaaattgtcgttacatgccacaaagattcgtatataccatattgattttccaattcttttatctgtataaaattatagtaaagtcatatttgtgatgaaaagaaaatacaataattgagtttgcactaatatgagatgatagttttaattggggtaatattataaaaaaataattataactagctattccaatttaactaattaagttaaaattttgattttttcttcttcttaaagtttataacttaaaatgtgcatattagtaagtcattttagtagcttataaactagatcaactaaattataaattgattccagtaaaaaaaattataaattgatttgatcataataaatttatttatatatgaacttattttagtagattcaattctaattaacttaatttcatatgctactctaactatcattttaaagtctactacttttcttcttcttttttcatttgacttaaatatgtttttgccttttgataagagattgaattttgtttttatttcctaatattttttttttaaaatttgttggtgaaagtcactcctaaaatttcagcaagcaagcacgactttaagttaggatgagtatgatgcagcagcaccacgcacataagcaatattaaccctaattttaaaaataaaaatttcaaagataaaagatgaaagtgaatttaatttattaaaaagataatgaaaaggtatttacctttataaattaattttaccatacacacattatcccaccccaatttcatgcaaacattgccgagcaagtagcaactagttgctgatcgagaataggtactaattaatttaagcttgatgcatgagttaaaatgttcaattaatttaggccctaattaactgcatatgataacttgattgaaattacaaaataatggcatcattcaattacgagacatgacccatatttttaggcttcaatgacccaacaacacccccaataaacttatatttgctagtacaaaattgagtttcggatgtatcttatagtacttatataggtacatagaaaaaatattttttttcattgatatattatttataagtatattgtcatcagtacacagtaaaggattgttaatgtcacatgaacttggatctttcttgcatcacatgtaccattaaactgggatagccagcattttttgttgcatcaaaatgatgatttgcgcgtgcacgttgaattaatttattttagaattaattgttcatcagatttctaaaacaaaaattgttcatgcataaactctgtcactcaagccgaagcctagaagcctaaatctaagtgagtttatcagagttgaaatataatgaaaaatctaccgatatccgactattatatactttgtttaacatctcccaagtgtaaatttttaattaattgtggctaaatataacaccttatgcctttttttttttcagatcatatgtatttttagtggatggatgacaaaaagatttattcaaatatttaatgtaattatatatctaaaatataaacttaaaatccttattaaatttgaataattgacttgatttatacacttagtgagttagtggcaaataactaaaacttacgtttgcatccatatatacagaataactcaaactttaatattgatgaaagaataacactaaaaataacaacacttatagtttatcctttataaagatcaacttaaattaagttgaatttggtattagtgtgaagtccatgtaaaccgaaccaaccatgagcaagtttctataagtagttgagctaaacaaagtgaaatcaatattgaaaatatcacatatgggttcaaataattaatgacagatccaacatcacatgagatcaaataagcgtcgtaaacaagcattagagataatatttgtgattctaccaaagtacttaggtataatagttaatttccaattgaagacgaacaaggaccaccaaaaacaggtgcattgattcctccgtggagataaaaggtacagaattatcaataaaaattgattcaattgataaaaaaataaatttacatattcgatgtagttcaattctcatttttaatataaaaatattattgataagtaatttataaaattttttacaagtattttttgaatcttgtgaactcccaaaattcaacacatctaaacattttttataccaaaaagaaaaaagctacagatctctgctcactgtcattgccagcgcactggagcttatagcccaacattgttagcaaatatcaaaagaaatataagtaaaaacaaacaaacaccaaatacaagacaaaaaactaaagcatcttttagttccagaattatatactcataagtaaaaaagaaaaagaaaattacacgccatgggaaaccagtcttcaaaggctatatatatatatatgctcatatagtaactgaacaaaggttccctagttaacacccttcaatttgtcacaaattttccataccaggatagctagaaaaagagacaaggcactgaagattaaaaagacttcacgatatatgcatgactaaccatatggaatatgtcatcttcttgaacaaatcttaatactttcatatactacttcctaacttttcaccaaaaaattccttagattggaaaaaggagagtaaatacagttatatatgtaatataaccattataatcttctagattgtatatttattttgaattggatatgtaatttaattatattacatttatgatttagggttaaataagttttacgtttatttttttgacagaaagaatcttatatatatgattaagaataagagattcaatacaacttgatattataatggattatcattgtaaaaaaatatgtattatttttagataaaaattaataattagaggaatttatctattaatttaggatttattcttattctattcttgtatatttcatctttttgcttcagtttaatcagtaatttgaagttcaaatccaaacatgctgctactttcaagaattcttttattgatcataatagttttactcaacttgagattgtctcaagtaaaaaattattgtacactccaaaaaagattgaatttaatataatcatatgaagcatttaaatccaaccgaacgaaaacccgttttctgaattgctttgagcatttttatttctatttaatgatgatttaattatggcgttcttatgtgtcaagatgaattttattttttatcgttaaaaaattatttctggtagaaaatacatatctcatttttaagaaattcttcctccttattagataaatttgttccaatgtggaacaaacgataaaaaataaatttttcactaaattttttttcaaaaaaattccattaaaaatattcttagtagccgtacaaagtataattacaataatattaaaatcaacacatatatgagttcaaataatgacaaaccataaaccacaccactccaagcgaacacaatatagtcattaaatattaaatcttctaaaaacacatgcacatataagcataaaataaacatttattgatatttcatagttttggttcattttaaaatggaaaaatatcaccgtccgagaaatgctgggaatattctgacacattttttaaaatatattctttcttattatttaaaacatgctaaaatatttaattttataaattttccatttattgtttaatgaatttcacttattttataatcttcaagtaaattttagttaataataaaaaatttaattattagaaaaaaatgttaagagaacacttgtaacctacactccatttttgagtgggaaatatgttgacagtaaatgttaacaactaaagaaaaaaatgaataaaaaaatagatataaagatgataaagagaaataataagaatccgatgaaatgtttgatatatagtgatgtgtatttaacatcactttagaataagaaaagagataaaaaaaattatagatgcaatgaatgttgtgatgggaattatagaaaaaataaataaaaagaaactgtagtagaaatgtagtatagtaaataattataagagagttgattttaatatacttgttttttttttaaggacatgatttaatgagtataacatataaaaaatgtgaatttttttttaaagattccttgaaattcctctcattaaaatattaatatacatgtgcattcaaatactgacagatcacagatcaccgtatcacaccacacagctccaagtgaacacactcaagtgattaaccattaaatattcaacatctagaagcataggcatgcataacaataaaatatcattacatcttgacccctacttttagtttattttaaaataataactaataacaataatgatgacttaaagtcgtttacacccttatttattttacacttttttatttatttatctaactttttgtatcaaattatattacctactccgttatatatgtatttttttaactttatcataataataattagaatactaaaattaattaacggtgcaaaattattctaatttaataataatttagattttaaatttaaacatataactgtaattaacaagttgttgatacagttgaatcgaatttgatctcttaatctcaacattaaaaatcatatgaataaaaaaatataattaaaaaaaagaccaacaaaaattaatcgactgaattttttaataaaaaattggcaccaacaaaagtaataaatactcacttcaataataacaaaaaagtgttatgtaacagaagaattatatttaataaaacacacttgctattatttaaataaaaaaaattctagatcggccacatatgatgaagcttggggactctacgttggccataaatagagcaagaaactcttccccttcacacacaccaattctccttacaatcaccacgagagaaagagaaggaaaaagaaaaagaaagactttctcttaatcatcatgaccatgaaagactccatagttctatattcagctttgggaagaggacaccttgtttcaatggtggaactaggtaaactcatactaagccaccacccttcactttccatcaccattcttttcctaaccccaccccccaaccaagacacccccacctcccccaccgccttcacctgcgacgccaccgccaaatacatcgccgccgtcaccgcctccaccccctccatcaccttccaccgcatcccccagatctccgtccccaccgttctccctcccatggccctcaccttcgagctctgccgcgccaccggccaccacctccgtcgcatcctcaactccatctcccaaacctcaaacctcaaagcaatagtcttggacttcatgaactacagcgccgcacgtgtcaccaacgcgcttcaaatccccacttacttctactacacttccggcgcctccaccctcgccattttccttcagcaaatcatcattcacgaaaacagcaccaagtccttcaaggacctcaacatgcacctcgtaatcccagggttacccaagattcacaccgatgacttgccggagcagatgcaggatcgtgcgaacgaaggttaccaggtttttatcgacatcgccacgtgcatgagggacagtgacggggttatagtaaatacttgtgaagccatggaaggtagggttgtagaagctttttccgaaggattgatggaaggaaccacgccgaaagtgttttgcattggacccgtgatttcttctgctccttgtagaaaggatgataacgggtgtttgagttggctcgattcacaaccgagtcatagtgttgtgtttctgagtttcggaagcatggggagattctcgaggactcagttgagagagattgctattgggttggagaagagtgagcaaaggttcttgtgggtcgtgaggagcgagttcgaagagggtgactcgggggagccaccgagtttggacgagttgttgccagaagggtttttggagaggacaaaggaaaaggggttagtggtgagggactgggccccacaggcggcgatactgagtcatgactcggtgggtgggttcgtgactcactgcgggtggaactcggtgttggaggcggtgtgtgaaggtgtgccaatggtggcgtggcctctctacgcagagcagaagctgaataaggtgatcttggtggaggaaatgaaggtgggtttggcggtgaagcagaacaaagacgggttagtgagttccaccgagttgggggaccgagtgatggaactcatggactcggacaaagggaaggagattagacagaggatttttaaaatgaaaatcagtgccacggaagcaatggcgaaaggtggatcttcaatcatggctttgaataagttagtggaactatggagggagcactagtagtatagaattagagatcgatagaatattattaagttcagaaaaaagtgtgattcattataaaaagcttaatgtctttctcaaataaacaacgagcacgagatcagttgttgttaattacgaatgcatgtttgcaagattaattatgaattgcgtctaagttacggatttggttgtcacttctcatgtctttttaaaatcatacaatttttatgatttttaaaattaaatgtcacttctcatgtctttagtttgttgaacaaattaagaatgcatattaaactgtttttttcgtatcatttttgtacttaaattaattaagaaattaacgaatgattaatgagaaaaatggtatctgattgatctaacttctaattaagacgacatgtagtgcatgtgtgaatggtttagggtaatgttcatttagaattattaagatactagtgttcattttcataacccttttcacgcattccttaattggacttttttgtttaattaatgactaaaattaatataataaatatgaactttggatcttttggacactgttaatttgtcatttcgctgatttgatggaagacgaagacattttcttctgctacacatgtcacgggaattggccgttagcggttaaaaaaataagtctgcaacgtaataaaactacgacgatttttatttttttaaattacaacatagaaaagttggtaaattatgttctttcaccacagtaattgaagatgcaccataaacatatcgatttgttggtcttattagtttcattatatggcatgcaatcatccaaatatgattattagcatcgaaatgatgaagtgatggtgcattgtgttgatttaataaatctgattgaagttagaaataatgagtctaggttatcttcttttatgggacagattaaatttatcgataacttgatcgagaaatcatccttacttaccatttctattttgctatcattatatacatatgtttataatacttgtttatcgatcccattttattaggaagatggttaggccctcaattttaataatcacgaataaaacataagaccgatgacctttaagaagagactaaattgtgttatctatatatcctcctatgagaaaaggttgaagactcatttataaaaaagttctatacaaaaggactatatcactacaagaaaaggtatttttttttatatatataaaaaactgcggttcttataacctctataaaatctaaaagagtaaaatatattttttttctttaaaaaaattaaattttatttagtccttcaagtttttttgtcttattttttttttatctaatttagaaatacttcatttttaatgctcaaagttattatagctaacgttgaatgacagttataaatcacacacaccccccaagaaaaagaaaaaaaagtgaagtttcagtaaaaaaaaaaagtgaaatatttctaaattagaagaatgagaataggttaaaatgcttttttctaaagggattaaaatacttttgaaaacctaaaattaaattttaaaacttaaaaaaagaaaaacatattttatcatatatgaaggaaccgatagtatattatattaattaatatatgacccgttatactagtctaattaaatattgtagatactacatatatacgataaatcagttctggatcatcacgtcagaaaaattgacaagtgatttcaaccagaaataaatattaattattaatttattaagaaaagaaatgaaatctatgattttatttttgaaccatatatccaatatgatgggaaagtgaccacttcttcaatggctctcacacgaagctagttgcagagtcgtgaacaaactcacatctagaaggaacactttgtacgctagatcatgttttttaattaggcagaagctgcgcgagtttcaaaagacggtggaacacgtcgtcgttgaccacttgggaactaaccgtcctcaacttgcttcttcttcaatccagtcttaaaatgaagtttttcaattttaaaataagggtatataattatttttgtgaatttaatttttctgcattcttgatacaaaaaatatatactacctattaattagaaaatattattgatatagattttaatataattattatatagaatcaataaacttgtcaaatacagtcatttatgatatatatatgacagtgtaacaaatgtgcatgcattagttacactttttaaaactcatttctatttatttttttcttctctttctattgtattaattattatatattttgtattctttcttttagtttcttattatttatctattgttctaccctaaatctattttaaaatggattagatttttatctttttttcttttaaataatttgagagccaaaatagattgatgggcaagttacaaaaaagaaagagaaaaatgcaaacagctactccgttaaacgatggggcagagtcgcagaaatatatattttctaattcttttatatatattattataggaagctaaaaggaattgaagaagaacggaaaacgaaaaataggaaaataattaattgaaataattattttaaacatattttcttattgaaatgtaatgggcagagatattaaatttgtcatattttaatttaatataatcttctctttatttatttatttatttgaaaattaaaatatgaataagttattgttttgaaataaattaaagaaaagaaataaaagtataaagtagtaattaatgggtaaaatacaatttaagctgctattattggcgcaaaaggttgtcaaaattattataagaaaagtgaattaaaaactaagaagttattcggagcataaagagatgcatgctcttgaatctttcaaaagtaatggctaaatgtgcatgtatagaaaaaatgaaaactatgaattgaaggagtcaatgagaagtgacgataatgatggctcgatttagatgggagcaggtgcatgctagttgcttctctaacattctctagtagttagttaggcattgaaatgaagggcagcgaatgtattgtcatatgaaaaactaaaacacctccatttaccctatatatttggtggaggggaaacaaaatgaaaaaacaaagaaaagttttaaacattatattaggagaattaaaacagtggaaggaaagaaaagtttaggtttctctagattagaatttttttattttttttaaaaaataaaaaataagagtgataatatgtttacttaaatttaaaaaatatttttttttctaaaaatattttaataaataagatcaaaactaaaaataataagttaatattttcagtcttttctaaagaactaaaacacacgataataccaatgttttctaaatcttaaaaattttaaaatataattatttttttaaaaataaaaactcaaattaatcaaaaggttttgtttttagaagtcagctattattcttatttttctttcatttttacttcaaccatacaaatttaaaattaatgtagaaatgttgttctttccttctactgtcatccattctaaaccgaccattaataaggcggggttactggttaattaaaataattagatctatcatcagttctacatatctaataatccgaattcttaatttaattattgtatgaccccaaagataactaatagagccacacttaatttcaaaagaatagctaacgaattaagcatctagaatttcattaatttggattagattatcactcgccttctatgtcacaccaaactaattattaataaaactaattctatatcaaattaaccaattattaacaatcacaaatcttatcagtcccaattggaatatgccaaatcatgcgttcaacatcttattaatcaagaatgtacattcaaatataaatgataagcaccaaccgataaagaactcacaaatcaagatttgtataaaagaagaggaagatttgatagagaaagaaattaaatcaccattggctagtactaacacaggtgtctcatccttcagtggaaacataatatagttccatggctagtaccacctgtgagctaaaatattcaagtccatatatatatactctcttgcatttgtataatgcattctcattaatctatacgtagttacgtacacctttactgtgactgtcaaacaactttacacacattgccggaaaaactcagtcttttatgaacatatatacaaaatacattgaggtggactaacatttttgagattctgcaaaaacatattcaaccaacttgcgtgtcaactcgcgtgcaaattacatatattttttttatcaaggctttaggaatatgcatgcctgcaattcatcatgactttctttcttggaaaattatgcattcagaaccttccatgatgtaccaacatgagaaatcagtaatataccaataatctctttattatcaagatttaatttgttgtgattaatattctagttgaatatttgatttcactatattttagaatatttattatcagcatatattacataagctgtctacagagattatagccagttcttaggaaaaattgttggagttgttttggtgatcattgtcgtgggcttcaagcctatgctgtttatatatttgtgtgttgatcatcagtagaatcatatttccatccccattttattctttataaaaataaaaaagataaaaaaaaagtaaataatgtacgatgatatatctataataactcatttgctaatgtgacaaaatttccctgaattagcagtcacatgcatgcactctttattttcttttttatatgaaaaattatcatacacgtactaaattggcgtttgtctcatgcacttacacacttaaatttaatttaaatgtaacgggcagagatattaaatctgccaaatatttagatgattttgtggtaatgacattcttagataaattttactttttcatttattcattattttttttaaatataataggttactatttaatttaaaataaaaataaagatataaaaagcataaaatgtagaataatgtattaaatacaatttttatttttacttagttacaccactaaagtaaaaaattatcaaaatatttaaatttgaggtagcataggattcaaagaagagtctgctaagaaaaaagattgatcaaaagagagctaagaacaaaacgtgatgcctaaaactaaaaataatgaagtaaggagccaatagagatgtgacaagtgacactacacttatgggcttgtcccatttctactgtggagcatgtgctagttgttaagcaagttggtaggcattgaatggtcataatgctaatgctacgtactacttatttggctatcaatttgtcatttgtcatgaagggctgcgaaaaaagtaattaggcatggagtaatattataggaccgccacattttcaatatcattaattcacttaacgtttaagtttgttgtccgtttggcaacttaagttgctttaaataataccttaatcagttgtaccattgaaaagtaaatgacaggcttcgattgttacaagagaatccataacatgttaagaatattggttaaaaaaattaaaatgaaaatattttttatttaaaaaataaaaaataatgttatttataaaaaaatttacattttcatataagttatctaataaatattttatttttttattattttatcgatatcctaaaaatattaattaataagaccctttaagaaaatcatatgttagattcatgtttaagttagtttgttgttaacgacttaagttgttttaaataattaaaattcttcacaagtatttataagaaatacaatgacacaaattaaactttaagttaaaatttatttatgtattttaatttttaaaatgggtatataatttttttaagttaagatatatataaattaattttaacttataaaaaattatcttatattcttatatccctttttttttcttataaatttatattttttaaaaatcaaataaacttttttgttgaataaaaatcaactaaactactcataattaagtaattaaaaagcaacaacactaccagtgattgtcttgttaatattactgtatctagcttctctaagagcagcgcggttgcttattttaagatacaattgcttcggatttttttatatcattggagaatatttatgtgtgatgtcaggcggtttaaaattacacttcattgtttctataagtattggttacttatgattaaaaaaatattttttttatcatctaagactaagtgatcatttaagcaacgcttgaactataccatttgagtaaattttatataagttgcttaattatgattaggagagttaaaattaacataagataagaaacataaagtggattgtttaaattacatttattggagatgctctaaagcaaattatattactttaaaatgtaaaataattaattgtaactataccgagctattgcatgatgaatcaaatggggttcatcaacaaacgggctaggtggattaggttgtacaaaatttggaatgtgtaatcttggtaaatggaagttcaggaagatatatagttcaagctagaccgaaaaaggatcgaggtaaggtgatctcattgtcctaattcttttccttttgtttgcagaaggaaggaatatctcttaattcacacatgatacttcgttttacagtgaactattggtcaagaatttcataattgtaaagagcatattgagatgcttcaaattagtttcagcacataaagtaaatttctacaagagcaagttagcaggagtggtgacaatagaagaaagcatgattcaaaggtatgttgcattgttaaattgccattcaatgattgctatgtttgtgtaactgggcatttgggtacgtgggggcaaacccaaggagggaatctgatatgagcaagcttataatcccagaaatagaggaagcacaagcaacaaaggtgcaaagagaagaagggatcaagagaagagtgatgaaaccaacgtaacttgatgattacgtctaaggagcagaattgaaagaacaaattagtagaatcagcaccaaatcatgcttgtggtgtttgctccctcataggcaaacacgcataacaaaatctgttattagaatattccttttagatagaattgacacaaatatgttatttgaattcctctatatatagtcatgtaaataaataagcaggatatataaaatttctttcttaccttgcgtttatcttcttcttctcctttctctttggtctggaggtgctgaccttcgaagtcagtaaacaaacccagcacctaacagaatcaactcggaaactcattgtgcaaaagtttgaaggaaaaaatgtctttatgaaaacacaaacatcttttgttcagagagagagtgtggcttattaatttggtactttcctttctcctttatttttgtcgtttttcaaaatacctaaaggtttggctcataggattaaccatatccaaagatttgggtatgttggaataaggtatgtagttcatagcaagtgtgtagattgggaggagaaagtataagtacagaatattacaaactatttgggaacttagagcaaaagtaatgcacaaaggagagatgaagagatagttagttgtgtgtgtgtgtgtgttatttgggaacttagagcaaaagtaatgcacaaaggagagatgaagagatagttagggcgagttgggaatggtgctttagatggaggaaattaaagttaggtttgagtgggagatccaaataatgcaaaagtttatgcagaaataatgcaaaagtttatgcaggagattaataaagtacaattaaaaaaaaaacaaggatcgaatcttctgactattggatatgaaaggtgataacgcaagagcgtacacaataaaagttacacatactcattgttgtatgaataggaggtttcaaagactaatccttttttaagttcttttggagcatcagggccacttcaaatgtatctaattttacttggaaatttcaatggaacaggatacaaaccgaagatagtcttattagaagatatattgcattgaacaatattggtgttgtgttccattttgcgctgctcatcttatgctcacatgttttcttctcttcatccatctggaaactatgctatagacaattggcctggctttcaagtggtgatatccgaggacaataagaatcattttgtgaaacattgttgtgatctcacatggaaaaagtaaaaaaaggcttagtggattgtgtggtttgctacggtttggtcgcaatggttagataaaaataacatcgtcgttcaagaagagtagacacaagccttgtatgtaatggatcttataaaatttagattgcaatatggttaagtgctaagatgaaggattgcaccttttccttatgattggtctgtgaacctaatattgtgtaagaaagcaatgcaatgaccatcttttttgtatttgttgtaacaatatcttttgtttatatgtcctatttactgataaaaaaaagattaattttgagtttgagtcctaaatatgtattaaaaattcagattaaattttttattgattgtaataattttatatgtcttagtgataattaagtttcgattattatgttagtttaattaaatcatttaattttatccgtattaaaattaagagttgaaatgaatcattctcattcactcttaagtctaactttaaaaaataaaattgtttccaaatgatacgtacccaaaatactcgtaataataatcatacaaaatttatatatattagatatcatatcatatactacaaaatgcacttacggataccattatcggagccaactaatcagtttggtcctgttgttggacatgtacggtcgcgaatttcacgtggataccattggtgcataaaattagtaacggatcccattgcccaaatttctaggaccatttgactcagaaatcaagtcgaacaatttgggaaggtcatacaaagttcacaccacctttagagtgtggttgctttttgaaagagaaaatttttatactttattttatgagactcgtatttttttaattctactttaatttttttaaaaatatatatattttctcatctctatttctttcttctaaattaagaatacccttaattccgataacactggggaatggcatgttctatgtcttagaacatgagcaatagggttagaataattaaacaattctagacaaactaatcatccattgttttatgtaaaactaattcaagttcgtccaattctagaacaataaaccatcgtggaatatttcacatatttgtgcatgaactgatttcttattgtagcttagtgaatccaaaacaaccttcatatcaaagtcaatttataaatggctaaaatttcacaatttcttaacggggattaatttattggtctaattaagtcttcaaattcattgtcgttggttagtttttacttagtcatatcatataagttaatgattttaatttccttcaaccagataaataaaaaaattagaaaaaaaagagcatttatgttttttaaactacaaattcatgttaaaagagctaaacagctaaaaaaaaattataacataacaggccgattagttgtatttttatttcctagtttttatttcatttcctattaacttttacattttaaacttttacttagtgacataaaaaatttgttaaatcattaaaaaaatacgtaaaatcattaaaaaaaatgtaacaagctattgatggagaaataggctaacacaataacaaactctataatagagtaatagaccacggaaataaattctccaaaacttgcaagaatctctgaggaacatcgataaagtatagagcacaaaataaaaatgaaagaaaacagagagacaatttctttaacatgaaaaacccctcaatgcaaggaaaaaaatcataggtcattcaaaccaaagaaataactcaactatattcaatgaagatacaagagaacctctaacaaatgcactaaaacgtgctacaaacagtcaaatcaaaacaaactccaattggtacaatagagacaagaagaaaaaatctcaaaatataaaacagataatctcaaaatataaaaaatctcaaaacaattatctctctctccagatatatttttcatgatccaaccaaaaaaattgaaatataacgtgtatagaaccccttgcccaaaaatcagtctgatccaacggtcaacgaatccatagttgtaatctgaaaatcactctatcatgggtatgcgaaaatcacaatgattttccttctcattctttctctcgcaatgatttatcactttttcccctttcaaatgagttcctctcattgtatctcactctctaatttgaccattctccacttaaataagtgagacatacgagttttctcacttgagtctttactccacatagggggagcccaaaaaacccaacaaatctctccctcacaactatgtaaaggtaactgccaaactgatgatctcagagcaagcttcaaacttccatcttagtaatgccttagtcatcatatcagcatcactaaaggatttaaccttcaaagggccacaaacatctgaatacaccaattcaagcaactcaaattttctggagggaggatgcttcttgaaggatactctagtttgcttaccaaccatgcaatgagaacatttttccaaatctacattcttcaatcctggaagcatatctttcttggctaaacaatttaaccccttctcacttatatgactaagcctttggtgccacaaagatgcctccatatccatagcatccatactgtctctagctaccaaaacttttgtctaatacaactttgaaattttctcccccttggccacaaccaagttacccttggtgagtttccattttccagaaccaaagtggttatcataaccagcatcatcaagtacttgcacaaagatcaaattaaagcggacatctagatcatgtttcactcctctaagtagcaactacattcccatgttggtttgcaaacaaacatcaccaacaccaatcaccttagacatgtcttcattatccatcttgaagactccaaaatcacctgaagtgtaagatgtgaagaactccttcttggttgtaacatgtagtgtagcaccactatcaattattcacacgctctcatcaagtacaagattaagcgaatcaaggtcatggagaataataagatcatcactggtagcagtagtcatacggtcatcatcatgattcttctctttttgcttacccttcttgtctttactctctttcttccgtagaaaataattcctctcgatatgctatgttctgtgacaataatgacactcaacattcttgtaccaagacctagacttgcttctgctcttgtctctatcgcctttatatgtgcttccattgttcaaacaagtagaaaaacaatcccttaaccaagagttgtgataccactctgatggggaaataggtcaacacaataacaaattctataagtgagtaatagacagtggaaataaattccgttaaacttacaagaatttgtgaggatcaccaataaagtatagagcgcgaaataaaaatgaaagaaatcagacacattttgtgtaacgtggaaaacccctcaatgcaaggataaaaactataggtcgtctagaccaaaaaaataactccactataatcaatgaagatacaagaaaacatccaacaagtatactaaaacatgctacaagcagtcaaatcaaaataaactttcaattggtacaatagagacaagaagataaaactccaaaatatagaacagataatacgaaacacttatctctctctctccaggtatctttttcatgatccaaccgaacaacttgaaatatcacgtgtgtagagtctcctggccaaaaatcagtccgatccaacagtgaacaaatccacagttgcaatcttaaaaacactttttgataggtatgcaaaaatcacaatgatttttcctgttcttctttctctcttaatgatttgtaactatttttttcctctcaaatgagttcctctgagtgtatctcactctctttaatctgatctctcttcattaaaataagtgagatatacaaaccttttcatttgagcatttattccatataagaagagagttaaaaaactcaacagttataaatttatgaacatgataaatttatgaacatgatgatacctaaaaaagtttccaagttatttctagtatctgttgatcaagttttttctttctaagtctattatttttttgaaagataatttaatatgtacattttaacctatacaaagttcaaaatatataaagatccttgaatttataccacaatatggaatgtatttaagatactaaaaatcacactaaaaagctcgtccttcgtaaccaaattttaaaatgattgattctttaagttattgagagcaatagaagcacaagttaaagaatgtccactaaaaaataaaataataatagcatgatacataattttttgaaatatttagaaattatcaataaaataatttaaaagtatcttaatcgttgtaaaatggcaaaatcaaaatatgcattatcatttcaaaatctatttgttaaaaacatagacaatacaattctttaaaacatgaatgatatttttctatgttctgttgaaaaattataaaatattggctttgacatttttctaattgaagaaactttttcttcacaaagaatacaaaccaaaaactaaaaaaaaaattaatcaaaatgaaaatatttatgtaaacagctaaacataaacatgaaatatatatctttaaatttcatttttataagtgtaaatttaaatacataattacttattaattaaaatatatctcttctttataaataagaatttttttacagaaaaaaaattagatataaaccaatttgattataactaactactctgttaatttaactttaaaagcgaaatacattagttatattttgaattttgattttctttgattataataaaaaatacggttaaaattctgcaaagaaaaattaggcaattgcacttaataaatttagtttacttatgaaaaattattgcatatcataacaaatcaaaattctttaatttatatttcataaattgaaacatttatatttattttgagggattcattctttgacttcttttcttcatagtcaaaatttgagaaaagaatctaaatttggagattagtgttttaaaagtttgtaatatattttttaccaaacaaatcgattcactaggctaaaatcaacttaataggtattttaaaatatattaaatatttaattttatttattctaactttctgactaatttattgacattttagtaaatttggtttatttcctaattcattatgtcaaattccaaacgtctgatcaatatagtgaattttctaatcactatttaaaatttccatttaagtatatggaaaaattattttttcccttatttatatttgaccaaaagcaaaacaataagtctgaattttgctcctataaatattagttacatgtaagcagtggaatatataaatttaaattaaaactaagaaatagaatattcaagatgaattacttttaaaaataagtgtaacacaattcttttccaattatttataaaagcataaaaaatatttttcaatttaaaaggcatgttattgacaataaaactcacgagtaatatcaaatatacttttgttgttctttttaatactattagaatttgaccttaataattaataattcaggctctaaaggttaacattaaaggttccagtggattctcagcgtgaaattcaaactctgattagaggataatactaattaaaagagcatttcatttgtgatacaattttatactatttgttgactaaataatttatttattgatcatttaaattcctatcacgttataacaaaaaataaagttttataagagcaaattaaacttggtatatgcttttacatactcaatttgcatgcaaatttaacttcaaaactttaatccaaaattatacttgtttaatttttgcactatgtgatggctacttcccaaagtttagtgggcgtgtactgctaatcatgatcggcatatttctccattttaaaattatagggcaggttgtcgctcacaacgtgggccaaggttgcagaccatcccggttcatactcatttcaatgatagaatatttttggcttttttgtcattgcctaataattttgttacctttttgtgatgtatgtaaggaaaataaattaaaggaacacagaatttcaacggaacacacctaatagagaaaacccatgacccatcccaatcaatattcaaaaagaagaagaagaaaaagccatggccatttccactggcaagagtaagtctagacccacaggagctctactgaatagataaaattaacaacagactacatgaaagagtcgatattttaaaaataatacaatatatagtgatattctagctaaataaaaatataatttagccattattttgttataatttttttggtatttttttttataaaaaagttacatctctaatttctaccatcatgtaaaaataattttggcttaaaaaatatttttttagaataaaagagtcagtcagtatgataaaatgagtgtgtcaaggatctagtttagtttcgaaaatgagaccattaattattcattaattaaaataaatatttcaaaatattaattaaaggatatttaatatttttttaaaataattttaatttttcaaaactaaaagtagatatttttgtaaaatttaatttatgaaatattttacatttatttaatatcttcaaaactaaatcataagggtactgaactaatgatataaaattaataattaatttgtttcttccattatttaattatattgtaaaattaatagtataattatatttatattgtacataccatattttataaaaaaaagagataaaagtataaaataaaatataatattacaaaattattatgggaataatataacttaaataatcacatccacccaatctgcccgtaaaaaaaatatgatagcatattttattatcgataaatactaattattaatttttaataaaagagatcaaatttatattttttatttcttttttaattcctcaaccaactttatattttcaagtgtgttgagacgttacactcatatttatatcctttttgttatatacactcatatttatatnnnnnnnnnnnnnnnnnnnnnnnnnnnnnnnnnnnnnnnnnnnnnnnnnnnnnnnnnnnnnnnnnnnnnnnnnnnnnnnnnnnnnnnnnnnnnnnnnnnnnnnnnnnnnnnnnnnnnnnnnnnnnnnnnnnnnnnnnnnnnnnnnnnnnnnnnnnnnnnnnnnnnnnnnnnnnnnnnnnnnnnnnnnnnnnnnnnnnnnnnnnnnnnnnnnnnnnnnnnnnnnnnnnnnnnnnnnnnnnnnnnnnnnnnnnnnnnnnnnnnnnnnnnnnnnnnnnnnnnnnnnnnnnnnnnnnnnnnnnnnnnnnnnnnnnnnnnnnnnnnnnnnnnnnnnnnnnnnnnnnnnnnnnnnnnnnnnnnnnnnnnnnnnnnnnnnnnnnnnnnnnnnnnnnnnnnnnnnnnnnnnnnnnnnnnnnnnnnnnnnnnnnnnnnnnnnnnnnnnnnnnnnnnnnnnnnnnnnnnnnnnnnnnnnnnnnnnnnnnnnnnnnnnnnnnnnnnnnnnnnnnnnnnnnnnnnnnnnnnnnnnnnnnnnnnnnnnnnnnnnnnnnnnnnnnnnnnnnnnnnnnnnnnnnnnnnnnnnnnnnnnnnnnnnnnnnnnnnnnnnnnnnnnnnnnnnnnnnnnnnnnnnnnnnnnnnnnnnnnnnnnnnnnnnnnnnnnnnnnnnnnnnnnnnnnnnnnnnnnnnnnnnnnnnnnnnnnnnnnnnnnnnnnnnnnnnnnnnnnnnnnnnnnnnnnnnnnnnnnnnnnnnnnnnnnnnnnnnnnnnnnnnnnnnnnnnnnnnnnnnnnnnnnnnnnnnnnnnnnnnnnnnnnnnnnnnnnnnnnnnnnnnnnnnnnnnnnnnnnnnnnnnnnnnnnnnnnnnnnnnnnnnnnnnnnnnnnnnnnnnnnnnnnnnnnnnnnnnnnnnnnnnnnnnnnnnnnnnnnnnnnnnnnnnnnnnnnnnnnnnnnnnnnnnnnnnnnnnnnnnnnnnnnnnnnnnnnnnnnnnnnnnnnnnnnnnnnnnnnnnnnnnnnnnnnnnnnnnnnnnnnnnnnnnnnnnnnnnnnnnnnnnnnnnnnnnnnnnnnnnnnnnnnnnnnnnnnnnnnnnnnnnnnaacaaaaaatacactctttttaattttactatacaattgtgcaataaatacttgacacattattatgtttcattaaataattacatacaaatttaaatgttaaacaagtaatgtacattaaatatatattaacaacactaacaaaatatatatatatatatatattaacagcataataaattattgattgtcttaatttactcttttgaagagaagaactagagagaaacttatctatacaatttacttctatatatagcaatttcatataattatgaaaaggaaagaaagagaaagaaacataatgagataacaaatgtacaaacagaagaaagatcgaagagacaatgtaattcataaacatgataaatgttgatatagttagatagatcatcatttataaatcggtttttaaaggaatctttcgaatatctatactctactataaatttaatatggtatcagaatttgtgataatgagccctagttagaggagacatgttaagggtagtccctacgcagtataaatttaatacaaacagttagatgtcaatcatgtttcctttccacaacttgatagccaacttatctaacgtgacgcacgaggttccaccttcagccattgcttcctcagccctttttttcatctcgaaaaccctttgtctaatctcttttccctttaccgagtccatcagttccctgactcggtcccccaactctgttgcactcaccaacccatctttgttctcgttcacctccaaagccaccttcatttccttcaccataatcaccctattcatcttctgctccgcgtagaggggccacgccaccatcggcaccccttcacacactgcttccaacaccgagttccacccgcagtgagtcacgaacccacccaccgagtcatgactcagtaactgaacctgtggggcccagtttctcattatcagccccttctctttggtcctctccagaaacccttctggcatcaactcgtccagactcagttcctccatcgagtcagcatcatccaacctggacctcacaacccacaagaacctttgctcactcttctccaacccaatggctatctccttcaactgagccctagaaaaccttccgaggcttccgaaactcagcaacacgacgctctgactcggttgcgagtctagccaactcaggcaccctttgtcttcttcatacggtgcagagatcaacggtccgataaaaaacaaaggcggcaacgtcccatctttgcataacgccctgatggatttctcttcaagggcttcaaacgtgtttgctataatgccaacactgcacctcatgttttccgctacctgaagcaaggactggtagctttcactcgaagggtctttggcctcgtttggaaaatcgtcggtggagattgtgggtaatccagggatttgaatctgcagcggttggtctttgaccttctctctagtaacggtttggtgaatggttggtaaacgaaggagtagagagagaaaggacgcgcatgaagcgaagtagaagtaagtggggacgttgttgttgagattttcagtgagggctttggggtcgttgaagttcatgaagtcaatgacgagggctttgaggttcgaggctttggcgagggtttggagggcaacggcgaggttttgcgtgctgtggcgggtgagttcgatggagaggatgtgagaggggagggaaggagtggagggggggagtgtggcgaagggggcgtggtggaatgtgatggcgggggtcgtggcggtgacggtggcgatgtatcgagcattagagttgcaggagacgctggtggtggaagaggtggtggttggagtgaggatgaggatagtgatggaaagtgaagggtggtgagttagtatgagtttgcctagctccaccatggaaactaggtgtccccttagaacattagggtatagaacaatggtgtctttcatgtttgaaaagtgatgagattttgagatggatttggttctttggatggagttcaagggagatgttagctctatgtatttatggtgacggagagtgagccatctaacagactaatagtcttactattttattacactaactttttcacaaatgattatgggtttatttatattatatatataaaaaatactactccacatgttattatggagtattcttagacattaatttgaaattatgaggtccgcatgatttttattactctgttgttctcattataatttagtgtaagaagaaaaaattctcaaaatatttacaaaatttgaatttattgaatttatttgaaaaaaaatgttcttaataaaggacttttattttaatttttttaatatcatattttttttactttatatatcttatgatattgatgatatgtacaataaaataaaatgaattaataatgataatattaattttataaaattgttattttttttatttattagtcctttttggattgtgtaaaataatttaagattactaactatttttcataaagctttgttgattgatggaagaggattaagcagaaggatttgagctttaacagtatgaaagctatcattgaggccttttaagaaacagataacatattcagtttttatactgtttcatagttttggtgagattacaattaagaataattagaattacaaatacaaggcttgcgatcctttagaaagatgtatcaatatgacgtaacttgtaaggctttgatactctcaatgaatagagaaaaatatagatacatgaagttttggttcgattaacgatttgggagagtttttttaaaaattcaatcctttccttttcttcaatcaacggttgaaggaggaaaatatggtatgccacagacttcaacaactattatcttcttttattctttgtgaaaaacttttagtaccttctattttttttatatgattaaaattgaagcgccagtacaagtaccacaagtagctagagtaacgtgtcccctccaattcaccaacaccaatcaccatggacacaccatcattatccatcttcaagactctaaaataacatggagtgtaagatgtgaagaactccttcatgagtgtaacatgcagtgtagtactactatcaaattattcacatgctctaatcagatacaagattaagcgaatcaggatcatgggaaataacaagatcatcattaatagcagtagtcacacggtcatcatcatgatccttctctttttgcttacccttaatatctttattttccttctttcatataaaacaattcctctggacatgccttgttctttgacaataataacaatcaacattcttgtatcgaaacctagacttgcttctgcttttgtctatatcacccttcatatgtgcctccatcattcaagcaagtagaaaaacaaccccataaccaaagagttctgataccactctgatggggaaatagaccaacacaataacaaactctataacagagtaataagcagtgagaactgaaaataaatttttccaaacttgcaagaacttgtgagaaacatcaataaaatatagagtgcaatatagaaattaaggaaaaaatagaaacacaatttgtttaatgtgaaaaatttctcaatgcaagtgtaaaaaccacgagtcgttcataccaaagaaataatttcactataatcaatgaagatacaagagaaccttcaacaagtgcattaacacgtactacaaacagtcaaatcaaaacaaatcttcaattagtacaataaagacaaaaagataaccctaaaatagagagcagataatacaaaacacttatctctctctacaaagatcctttttccgatccaaccaaaaaatttgaagtatcacccttgtagaacttgttgtacaaaaatcaatctaatctaacgaagaacgaattcgcagttacaatctaaaaaatgctctctggtgcgtatgcaaaaatcataatgattttctctctccttctttctccctcaatgatttgtaactctttttctttctcgaatgagtttctcttactatatctaactatgtgtctgtctctctaatgtgactcctcttcacttaaataagtgagataaaatgaatattcttatttgggtttttactccacataggaatgaagtccaaaaaaaattcaatcgtattttactaaaaactaaataaatgagaattaaaataaatataaagaaacaaaatttatgatcaaacatttaaattaaatttaggatgttttcctttttttttcttcttcgactgatttcccttttcacataggtaataagaatatttcaaaaatggtgataccacattttaagtctcatttcaaaaatcaattcaaaattttttacatctggagtttacatttatgctgatggaatcttttagcttacactcctaattataaacgaaaaggacaaccaatgaggcctaattaagcctcgtctttagccgactcgttacggtcttcatggacatcacatgtgcatcatacgatacaaagaaacacagaaacaaatgaagtgagatacatcccatattatgctcaaagtatgacaatggagacagtattacaaaaatcaagaacatacaggctttaaaatacacatttgataaggtagtatgcaaggcgtaagaattatttgctaactataacacctaaaaaatgacacttgaatataaggtgtaaaaccaatgatacattttggaacctacttcaaagctaataattaaataatattgtgggaatgggatagatttttctttgtttgcacaaaacacacacacacacaaagtttcataattttttcttttgcacggcaaaaagcatcacatacataacttgtagcaaacttaaacttcataaatgactttaatggctaataaatatattaacccacaactggccttagaagcccttcaagagaattcaacttaaagaagtctactagtttaaagttcaaaaaccaaatggataagacaataagagcatgtttaggatagctgaaatattcttgagatttcacagttgtgtttttagagcaaaagcgttgtttccaaaataagttgtgtttggtacaatagctgaaatttgtgataaaaaaaattctaaaaaataaggtatctttttttttatctaaaaagttgtagcttatgattatattttaacaattttctttatttcttgtcagttgttttcatgttcttttactgtataaaagttgatttattttgttacatccaaacgaaattaattaccataaaatatttgttcaacaaatttacctaaacaaaaacttataatcaattataaatataataaattattattgtaataatataattttcactacaatccaaaacataccctaaataacccatgccccaatgtttgaacttacaatattccaaatcataaacaaaaagagaagccaatgatacctaactacctaagcctcgtcttcaacccacactccttatagggtcttgatagatttcacctatacatcatatatgccatacgaagaacacaaagaaacaattggagtgatatatatgcatcccacatcatgctcaaagtatggaaaatagagataggtagaacacgcacataacaactagaatatatcaatcataattagcacaatattagacaagtcaagaatatataatgtgtaacatacacatttaagaatatagattgtaaagcgtaacaattattgactaacaagagtacgtaaaaaatggtgcctgaatatatgatataaaaacaattacacattgtgacaccctttattccaaagcgaattatcaaataaaataatattgaggaaatatgaaatatttttatttcttttttagaatagcacaaacttttatatcctttttcttttgcatgacaaaatgcataagtttgtaacaagacgccttctaccatggaaaagggatatataggtcatgtaataacatggggaatttttctcagcctttgaatttatctctgttactcaatggatcgccttcttatcctgatctcaaccgtaagaaatcactttttacaaagttttagcggtactccatgaacatggatatccaaaaaaaaaatctggactaaaaagagatcctttttctctctctagcttaacaacaactttcttctttcacttgtttccctgcatgcttgaagctaacaaggtgctactcttcattcttaagttaaatttaaacaaagctttaacatgttgcagtcccataatgcccattgcactccctttcagtttcatattcaacaaaattaaaaccacgaaaaggagaatcaccaaatgagtcatgcaaaatccagttttagcataaaatggaacaaatttgattttttttttaaaagaggaaaaacaggtcaatataggaacatagttggcatgggagaaacatcagtgtagtcgatgctgccaaccgaatggaatggtagaaatctacatagaatataaggttcaatttttttatctcacattcaatgctcttagtcttccctatcactactacaagagttacaggttataatatatttttaaaaaaaaataaaaaatgataattgatcctttgaagtgaccaaccacgacgaaaatcttgaaacaatgacatggcaggaattatggctaaagatgaggtttatgaaataaaattgattctgctcacagaacaacaatgaaaaaaaatacataaagatcgtattgtccaaatttaatctcagtctcaccagtcactgcgtgggatactgtgtttgtaagtgtttgtaaaaaacaatccctacagttgagactaggaaaaaaatgtttgtaaaaaaaattccctatataattgagactaggaaaaaaaatgtgattcattgagttgatgtatccaaaagttgaacaaaaattcccatggtacatgcctacgccactttctgatgctaggtgtcttgtaacaaacttaaacttcataaatgactttaatggctaacaaagatattggccaacaatgactaacaagacggtttttagcgtgagaaaatgaagtaagtttttcacactgtgggaaacaaaatttacaccgttagatatattttttttaaatcaaaggcagaaattatttgctcttttttccatttttttcattttttctctctttcacaaactaagtgtataatgacatattaaatgttcataaataatttttctaaaacaaagaaaaataagagattaaaaataataaaaaatgatagatataataaatatttgatttattaaaaagataaaaatgaaaggcattgataactgctaaataattgtattttgatagtagaaaattagtcaaatattagcctgaaattaattatttagtagttatttgtgattaaaagttagaaaattaattaaattgaatttttgggtgcagatataaaaattggaggtgtaacaagcaaaaagggcaaaaaaattgaagaaaagaagaaaatttgaaaaaggcccaatccaatacgcgcgctcagcgcgcgtcacgggctaagcgggccaggaagtacactcgctaagcgcagggtgtcacgctaagcgtgcctacaaaggcccaaagcccacttcagcagctataaatagagagtcagtccaagggacaaagacaccaccacagaaccccctctcctaggggtttcatttactctctttctttcaccccatcctctcattgtaaagccctcatgaccatgagtggctaatccccctagctagggcctggcaggcctaaaaagccaatgatgtatggagcatttcaagagttatcgataaaaagaggaattccctccaggttctttatttatttaccgttctttctttttacatcctgtatctctgaacttgctttctgttagggtttagtccactcgggagagggtaaaacctaattaggggtaaggaatgaatacttgaatctgttttaagggttaggccactcgggagagggtaacgcttaagagaacactaaaaggaggaaattatcgggttatcttttagagggtttttcttccagtatcttttatctgcttttctttcttgcttattctgcatctcggactttgtttcctgttagtctttaggccactcgggagagggtaaagcctaattagggataaggaatgaatgtgtgaatcggttttaagggttaggccactcgggagagggtaacgcttaatagaacaattaaagaaagaaattattgggttagcatgacttaatgccccaatgcccatgctttagcaaacatctagaatgtaatcctaatgcatcttagttattaagtcttcgcaaagggcatttggaagataggtaattaaggtaggcttgtcatcgtgaggcatcaggggcaagtaaatggatagatgtggggcagaattagttcactggtattgataacagacaaatccagaatccatatatctaggctaattagacttgtcaggttttagcgattttaatatatagattttattctttatttttattgttggtctttcttagaagtagttattccttattttactatcgggttttaggagtaagcaattatatttagtagatttagattttaattatttgaatttcgtagaagtagttatctttattgcaatttaaatattttatcctctaatctatctttaaatcttttagcttatcttatctattatctttatcttttattttaaattttaaatcttttagcttatcttatctattatctttatcttttattttaaattttaaatttcctttatcttatctattatccttatcttttattttaaattttaaatttcttatcccttgctagatttagattattttaactaaatttacaatttacaaactgaaaagtacttcacataattgcaacaaaatccctgtggtacgacactcggcttaccgagaaattattactacgagcgatttggtacacttgccaaagagctaacaggcatcataaatttttagatgagcaaggatcactaatctgaaacaaattcaacttaaaaaattaagtctacaagtttaaagtttggaaaccaaatggtagaatttttagaggacaagtcaatgtcaaactgagaatcaactctgtttccacagcttagccaacttatccaacgaagcacgtgatgttccgccttcagccattgcttccgcagcactcattttcatcttgaaaatcctctgacgaatctctttccctttgtctgattccatgagttccctaactcggtcccccaactcagtcgaactcacgaacccatccttgttctcgttcaccgccaaagccaccttcatttccttcaccataaccatcctgttcatcttctgctccgcgtagagaggccacgccaccatcggcaccccttcacacaccgcttccaacaccgagttccaaccgcagtgagtcacgaacccacccaccgagtcgtgactcagaatcgccgcctgtggggcccagtccctcaccaccattcccttctccttggtcctctccaaaaacccttctggcagcaactcgtccagactcagttcctccgccgagtcatcagcaccacccaactcggttctcacaacccacaagaacctttgctcactcttctccaacccaatagctatctccttcaactgagccctcgagaaccttcccatgcttccgaaacacagcaacacgacgctctgactcggttgcaagtttagccaactcagacaccctttgtcttcttctccatacggtgcagaaatcacgggtccgacacaaaacaagggtggtggtactgtcgcatcctcacttaacgctctgatggcttcttcttcaatggcttcaaatgtgtttactataatcccggcaccacccatcatggtttccgctatctgaaggaagacttggcaagcgtaactcaaggggtctttgcattcgtttggaaaatcatcggctgtaattgtggataatccagggatttggatttgcaaaggttggtctgtatcctttttttctatgagggttgggtgaatggtggggtagtaaaggagtaaagcgagagtggaggcgccagaagtgtagtagaagtaagtggggacgttgttgttgagattttcagtgagggctttggggtcgttgaagttcatgaagtcaatgacgatggctttgaggttcgaagctttggcgagggtttggagtgcaacggcgatgttttgcgtgctgtggcgggtgagttcgagggagaggaggtgaggggggaggaagggggtgttgaaggggagtgcggcgaggggaacgcggtggaacgtgatggagggagtggtggcggtgacggtggcgatgtattgagcattagagtcgcaggctaaggtggtggtggtggtggaaggggtggtgggaggagtgaggatgagaatagtgatggaaagtgaagggtggtgggtcagtatgagttttcccaactccaccatggaaactaggtgtcccctaccaagattagggtatagaacaatggtgtctttcatgttggagaagaggtatgagtttttgaaatggaattggatctagttccaacaaagatgcttgctctatttatggacagtgagccaccctactgttattttttttttttttaaggaaaatgtctggtgagcaccgattgatctatgatacatctaaggatatcgaagaaaaaaaaatatagagagatttaataaaatttatggtgcaataagaagaaagacaaaaaaagaaaatattactcattttttggactaactttgatgacttcatattataaagagaatattcttatttcttaccagtagacaccaagtagtgagtattagatggtttgggattatgattctttctgcatgatatattagttaaaattgtttctaattacttctcataaattaaaattttgaatatattatctttatctttcaatgtaagaatttttttttttgaaaacaaattgtttatctctatttataatttttttttagttgtctcttgcattagttttctttttaacgaaatattcttaattattttacataaatattataaattaataagataactaaaaaattgactaatatgtttagattaaatttataataagaaataatcgattttttttttatgataaagacaaaacaacactattatttcaaggtatcacagtgatcttgaggggtagaagtgattcttgaaatcttgaaactatttaaatttaaggataattaaatatatatatatatatatatataaattattaacaaattaaatgttattaactaattagtaattagttttcttaattcttaatatgtatgaataagttaaaagtgttttatatgtgtttaaggatgaatatagtatttcatagatattggttgggattataaacacacaatagtttcaaataatttcttgacaatcataacacttatttaatatctatgagaaacataaaaatatggtaagtgatataataagaaaataaaataataagtattaataaagtatataagattagaacgtgtctaaatatataatttttcttatattatttaatgagataattgtttatatatattataattattttttgttctttcagaatgagaaaaatataagaggaaaatataagaggagtgatccacacgcatttattttatttttaataaattttaaataaaaaaaatatggtgttagtatttttcaaatgtatttagaagtgaagaacaagaagaggaaatcttactttttgatctttatttaacaagggatttattggttcaacttattacatatatgcatcaagttggtttagaagtcaagaacaagaagagaaaatcttactttttgatctttatttaacaagtgagttattggtttaactgattatatatatgcattttaagttgctctaatactgtttattgtgataatgaagaactgtagtgtcatgagacatatggttccaatgcaatcaattgattttataatgcatatacattcactattacacgaaagttattctaccccaccgtttattgcatcggttcaattcattaagaatcggtgtaaaataaaatacattgacattttgtaaattaaaacaaaaaatattacaccaactttatataaatcaatacaaattaaatttatatattttaagtatatatattaattgctatagagccttttaaagaatatataataatctaaatataaagtaaactttatattttaacataaacaaatattaatcaatatccttataatattgattaaaaattaattttttttattaaaatacataaaattatatgatacataactttttttctacattctcctgtaattctcataataattttttcttttaattctttaatcaatacttaaaaaaaacacttattactaagacccttgaccatatgaaagcaggaagctgtcgcacacacgagacgtcccttaaggaaggggccgggacaatttaacttaatgacattaagttaaatacactttttttggttgaatgattaagttaaatacactacattgtcaatgttaagatataataagaaaaaatataatataatattcatagttttcaagaaatctcgagaaagtattattttctctataaaacaagataatgactgattgactgttgtcatttgtctagaattcaggtacgttgtttattcatgttaagttttcttctcattgtggacactgataaaacgtgtggatgtgatgacgggtttgtgtttttctactctgataagaactattttaaaatatttctatatgcataattaagtattttataatttcatacatattatttaatacttaatatttatttactttatacatattcctattttatcccattagtgaagtgtaaaaataataaaataaggtaatctcactatatattataaaatttttattcaacatattatttaatataaatttataataattttgacttgtaaattaaaattatattatcgattaagatgttaaatattaaatattagaattcaaattatcataatttttaaaataaatattcttttactaattttaagaaaagtaataacatgacaaaaattattttttataatttagataaaattatactttttataatttgtaaaattcaaaaataaattaaagttacatttataaaattatacataatttttataaaatgatgattttgccatttcaacctaatttatatcttatactattatcatctaattcatgtcaaatacgagacaggataacacaataataccattgggccacaataataggtttattgtacaccaaacattagacaagtaaagttcattctcatcttatcatattctactcaaattatatcctaattaccaaataagctgtaagttttttgggtattactctttaactaaaagttaagttttcataagtgctttagtaattaaaattatattttttataatgtgttctcatttttaatattatttttatttacaaaatttctatttatttattccttaattattatctttaaaatatattaaactaaaattatgattttagctcaataactcattcaaataaatatcaataaattaaagtacgataatgattatcaaaataaaagtttaattttatgtttaaaaatatttttttcaaatatatttgtgagactccaacttgcacgtccctctcctcgtcgtgtataacagttcttcatagctggaaataattattgatggattgatgatcccaaaatagaatgcatgattggggcgggtctgtaagaagagcttcttctagaacgaacctttatgacgaacgagtaatcaagattatctttattggaagatcttctcgaacgcatgtttaagattacgtgaatgtggtacacaacataacatatatatggaaagaaattgaccttttaaatagatttaagagactattttctgaattttgatattcattcaaaataaagaaataatagccaagcaccaattgccatttttaatatatattttttattattaaaaaatgatataaattttatttaataattaataaagaatatattatcaaggtgtcaaatataatatcagttaatatttctattaagcctatttaagaaagtagtttatatctatattaaataaagaaataattgtcagaatttcaatgaggagaggagcatggacaggaaatgttgtagagaatcagagtcatatatagaattattgaagaatcacttgaggctctgcagtactgtaatggcagtgaagttaacgtgaaggaaattgcttaagtggaggttggattgttagatacgattattatcttaatcaagttgttggattgatattttaatctatacatgctgattgtactataaaccttatgtaattgtcactttttcttttatgggggcgtcagagtgggttagggaattagaattggacttgtgtcatatccaaagccagtgttaataaaattctttttgggctgctaaaaaaatttaaagaataattaattgcgcaaattatgtatcactgatagtaaaaaagtatgtgtaattatttaaaaaaagagtattaatatataaaaataatacataaaaataggtgtaatatttaaattaaatataaatagatcgttttgtgaaaaaagtaattatttattaattaaattgtcttttctaagacgtgtccagtttcggttgagagaataacttaaatattactatttatcattctacaagagcataaacacgaggcattaagaaaaaaaatatttcaaccgtgcaagagtctcgagtcaaaaaagagtggcaacctttttcatctgaattattgtgagacattgtacagatgcccacggcagttgggaccctaaacaacacttattaattaaaaaaccacaaagttaatgaactttttgattggtttaatttgtatgatgttaaaaggatttaggggtatagtagggtactaccaacaggaattggttttagtcgaaaaggctaatctctccaaatgtggcaaattataatttaaattcttattgaaaaagttgtctatatttagtgtacaacattctctcaaatagaactacattgaaaaaacatacatgtgggggagaaaagaaaaagaatttgggacatgcaaggttactgagcagcttaacatttagttcttgcaagctgataactctcccatgtgtgatatcctttttaactaaacccttgtttctcttctcaaccacgagtgctgctctaagtgaggaagatatcataagtgataggaaaggcttcagagcctaactctttagttgcttttcctgctaaatcctagcttcttttctttctccttcatcttttgattactgaactatgattgcatactcatcagatcctagcttgaaaataattcagtggccatcgtttcggcttgcaagcaaggtctgtgtgagatttattttttcatatgcatgtgtttgttaccagttcatataattgacttgttgcctacatttgcagattcccttagcactggatatggcagctcaatttccaggaaaggactctgatctttggaggcgcatatgtgcagatgaatgtgtgaagtgtgttgtgattgaatgctatgacttttaaaaatgtcctgaatgctttggtagtaggagaagctgaaaaatggtagctttcagtatcttttcctgttcatgtttgtctatttcagtttacagttcatactagaatcattataaatgtaagaatataaatagccttagccatgtttcttttgggtagcaaaactatgatccaattctattaacattctatccagctttcttttcccatgtgttttttatttatttattttatatgcagactccaaatttggctcttgctgtttctatttcatgaaaagcaagtagcgttgttttatgtgcatatactattcatttatttttatctatttatattgtaaatgtctgtctggactcaggattactgaactcaaaataaataaaaagaacatatggttaacttcattaactcaaaattgcatactgcattatattggtcacccaaattttgtgtcagctgcttgtgttgtttttcttaattaacgaataaaatttaagttatagacatttcattaaaattatgtcatcagtcattatcattagttctgaattcattgtaatggaacaggacaatctctgtcatcattaaggaatttgaaaacagcatctctaagaatacacttgttggaaatttttgaatggggtttttgccttccctttgtaagaagtttgtggagattgtggaaatcttggtgagtcatttaaaggaaaactaatcatatattacctttgtagtcttaatgggttcttgtctctaactatcctatttagaagcttagacattcctttctggttacagaaagatgcagattcatccaaacaaggtattattgttgaagatgaagacctagagttcgttcctggccaatttaattactgttattttgatgattaattaactgttttcaagtttaactacctctgctatgaatgccaaattaaaattgctatcataatctaaattccaagtttgcaccatgctcagtattcttattcttatttccagatttggatacaactgtactcgatctaaattagttgcatcatggatccttttgattatgtgcttcactcgttttgaatttcatcatcatgcttatgtcaggtggttttattatagtattcatgtcatttgtgaatctgattgtatatatcttttcatgtcatttaccatgcttgtcaagattctaataagagaaaaaaggatggctcaatatcgtgctctctaaggaagaacagaagatcttctattgctggtgaggaggataaaggtggtaaaacctcaaggcagctgagaaaacaagcagctcgtaaacctgcaaacagttcattcaatgaggatgttgaagatttggaaggaactaacctgaacttattattggaccatggaatgttttatgcttccaactcattttttgactatgccaagaacagaaggatattatggggatggtcaaaggagtgtgaaaccacacaagatgattatgagaaaggatgggctggtctacaggtattttatctccatgttgggtattttcttttaattatttcagcaccctccatgttaaaaattgttttaggaccatattatcatcataaagtgatctacatattttgagatagtgtgttgtttggctatgtagagtattccaaggcaagtttggcttcataaaagtgggaagtggttgatgcagtggccaattgaagaggtagaaaaactacatgacaaacaagttagcataatgggagagaaactggttagtgaatcaactattgaagtctctggtatccctgcatcacaagtaagtaaactggtgctgcattttcttacattcttttttttatgaactttataacataggacaacatcaatgagatttttctttacaacttaacctttcaaggtcgatgtagaagtgtggtttgagctacctgaactagagaatatggagtggctaaatgaaagtgaagttgatccccacttgctgtgtagtgaagagtatgcatcaagaagtggcataataggtatgtggccgctggttgatctcttgcattggatacaactattggtatgtggccgctggttgatcattggtgccagttcttgcaggtaatatacttgattattatttatttacacatttttaactttctcgagttatgttgtgaagctttcttattaggatggctttcagagggatctgctaatactcgatcattttactcaaattgataaattttgatactacatactcaggctcggcataacaaagcaatatctagggacacatggtctcagcttttggagtttgcaaaggtaaaataataaactattaatccttaccgtaaacatagtcaatggtgccctcataatgtgaatgaacacttcctgtcttcatagggatttattgttgcatgaatatatctatatctatgcttgatgtctggctatctgtcttttattctgtttgtctcattttgtctgcgtatgatcatcttgcacttggtggctagttatagtatccaagcaactttcattttaaatcattaaggtcttctttctatcttgactgatgggggatctgaagaccgaaaaggattaagcgatgaagccatggagtggaatcagatccaagaaaaggattaaggttttcttatttttactttattaatattgttttatttgcaggtgaaaagctgcttaagaccaactgtaagatatatgtgtcctcaatggagttgggattttttctgcataaatcatttatttatgttatgcaggccctttctatacatagttgaatttatagtttaatttggttggttgagaatgtggaagtctatttttggttgcttttgcaggggaatgaaaatgtctttgttggtgaagggtaggtgagagaaatgaaaggtgtgttgggttgaataggtatgggatcaatgagcaacaacaacgcacgaaaggtggtgtgtgtgacgggtgcttctatattaaccttttctattattagaaattttcttttttctattattttattatatttttatttttatttaaaaaaacattttaaaatgattttttgaaaaatcaccttagagaaacacatttttctaagatggtttttttgaaaccatctttaaaaatagactattaacattatttatatgttgtttagaattgtcattgtacgtcttttttgttgtaatgaattttaaataaaaataagaatatataagtgagggacaaccttcacccgttgagctagtttttggggttcagttaggtctctcatattattcattttaagatggtatgttgaaaataatctaagtctcacatatattaaaagtaatcacacattagaatatataagtgagcgaaacattgacggagagcatgaaaaataagtattgattattttatcaattattattaatttttatcctattaaacatataacttagtcatttataatttattatgttctaatttcttataattttatattattttattactcagaatgatacataatattaaacatagcggccgccaaagtggcttgttgttcaggacctgtaggggccagttatattcagagggcggtggtgggccgtgatgggaacggagaagggagcaatggaagactgggtggatatgtgcgtccggtgggagattgagtcgataggcgaccagaccaatgcgttcaacaatttgaaatgggccaaagaagcgcttagagagttttgggtggtacggtccggtgaccgacgtctgtcgtcttgggcgcagcttgacatatacccattgcccctattcgaaggtgatatcatcgcatttgacatcaacgtacctcttcatagcatcttgggccttctttaagcgttgcttaagtttggagtgcaattgttgacgagactcaagcaaggtttggacaacttcgttattcgtcatgcccgtgacataatcgaggattgtaggtggtggcttaccgtagatgatctcaaatggagtcatgccaaagctcgagtgaagtgagtattgtaactccactctgcaagggatagatactggtgccatgtggatggttgatcatgaacgaagcagcggaggtattgctcaagtattcggttcatcaccttcgtctggccatcggactgagggtggtacgtcgtgctgagtcgcaatcgtgtgccgcttaatcggaataactccttccagaacttgcttaagaagatagggtcgcggtcagacactatgcttttaggaaacccatgttgtttacagacggtgtcaatgaagaggccggcgaccctgaacgctgtgaatcccgtgggaagagcacccaaatgcacccccttcaagaacctatctaccacaaccatgatgacagtaaatccgttagaggttggtaaatgggtgatgaaatccattgaaaggtcttcccacacgccctccggtgccggcaagggttgcagcagtccagctgggcgcttatggagatttttattctgttggcaggtaacacattctttaataaacctcttaacatcctattgaaggttgagccagaaaaaacttgatgcgagacgatgggttgttttggcaacacctaaatggcctccaagtggggtcgcgtgatgctccgaaatgaggatatggagataaggattgctgttattaagccagatgcgtcccttgaacaatattaatccatcgccgaaagagtaatcaaggtaagaggttgggtgttcctgaatggcatccttgagttgctagaatttcaggttatcagcgagtgactacttaatatcatggaggaaatcaagttgtggtatggagaggatgaggaactggccctctgggtttggagctcacgaaagggcatctactactacattcattgcgccggacttgtactggatggagttctcatagccaagcagtttcgaaaggtaataatgttgtttcggcgtttgaatgacttgtgtcattaactctcggagacttttgtgatcggtgaggatcgtgaatggccggcccaggaggtattgcctccacttcctcactgccgtcacgacggcgtggagttcacgtatatacgtggatgcatgaagtagccgaggtccaaggtgcttactaaaatacgccaaggggtggccattctgcaacagcactgcactaatagttgttccagatgcatcagtttcaaccacgaagggctcggagaagttaggtagggcaagtacaggtgcattggtcatggcgagtttgagctggtcgaaggcctgctgagagtccggggaccaatcgaaggcgtctttgcaaagcaaggtcatgagtgaggtcgtgatggaagcataccctttaataaattttctataaaatccagtaagcccttagaatgcacgtagttctcggaccgaagttggtggtggccactgcaacatagcttggaccttggagggttctggagtaacacccttgccagacacgatgtggccgagatattcaatggattcttgagcaaagaggcacttagaatgcttaaggtaaaactcagcgtgttggagggcttgaaatataatctccaggtggtataaatgtgaggataacgaatcactataaaccaatatatcgtcaaaaaaactctggcaaaccttcgtaggaatggttgcaggagttggttcatagcggattggaatgttgaaggtgcattgcagagcggaaggtgcattgcagagcccaaagggcatcaccaaatattcgaagtggccattatgggtgcggaaggctgttttctcgatgtctagttcactcatcaagatctggtggaacccctgtcggaggtccagctttgagaaccacgaagcatggcccaattcgtcaagcaattcatctattgtcggaatggggaagtggtcgcgaatggtgactgagtttaaggctctgtagtcaacacatagccgccaagtggcgtccttcttcttaaccaagagtacgggggaagaataaggactggtactcgatctgatcagtctggcgacgaggaggtccgagacttgtctttcaatctcattcttttggaagtgtggatagcggtaaggtcgaacggatattggggtagtgaagggatgaagggtgatacggtgaaccacctagcgtggcgaaaggagtcgagatagggtccggaacacgtgctcatattggtgaaggaggtgttccacagagatgaaagggtgttgggtcgtggttgggtcgggttggtccgtgggtaggaggtgtagttggtataaggccgaagtggaacccgtttggatgaagtgcttcagttcggccgctgaggctggttcgggcccaagattaacatctgccttgagtgtgatatctcgacccaggtggttaaaatgcatgatgcattctgcgtagtcagtcgtaactggacccaggtgtttcaaccaatctatccctaacactgcatctgcaccacttatctggagcaagtggaaggagaccacgaaggggtgaccttggatagtgacctgagtttcaggacaaacctggtcactggctaacgtagaaccgttgcccaccattacttggaggggatgagtagtttgtagaagaagtttaaggaattgcgcgattcgtggttgaaggaagttatgagtacttccactatcaatcaggactgtgagacgtgcttttttaatggtgccaaagattcggaaggtttccgatgagggtagtccaccaagagcgtgaagactgatgtgtgagcagaccgcctccggtatcggttttggagagttcccgtgagctgctgtctgatcatcttgtggttcaggttcaatggcctcattgatttgtgactgttcgtcagtgatgaagagtaacactcgacccttgcacctgtggttagcactccatttttcatcacaattatagcataatccttttttctcgccggaaagccatttctgccggcgtgcgcttcacaaatggtgtagttttggatgaagtattcgaagcttgaggaacgaagggcctgggttggggaaagcttcggggtgcctggttcgttcgatcacgtagcttctcttcttgaagcttagctagggctgtagcttggagtagggatattggttgaagagccatgacctcacgtcgaacttcagggtttaatcctgagataaagcaacttaaaaggaaaggaggtggatgacctaccacgcggtttgcttacctctcaaactccgttaggtattcgttcaccgtgcatgtttgcgttaatttgaacaatgctcctttaggatcatcataaaatgttggcacaaatcgtgattcaagagcttgcagaaagccttcccaggacgtgataaagtcgttgctgaacatccattgataccagtttaaggcggcgccgtcgaggtatagggatgcgactgtgattcgttcttcctcaggtgcattttgatattggaaaagctgcgtgatcttgaagattcggcctaatggatcgcgtccatcaaaacgcggtatatctagtttaactgtgttgcattgatggctatgatggtttgtggcaggtgtgtttgtgtggttgccggaatcgttggaacgaaggtgctctagaatggagtctaccttgcccgcaaggtcgttgtaacgttcattgatagaagcatggccattagagagcctcacaatggcttcttcaaggcgatcagttgttgttttcctggttccgtggtcagccatggagatggagacggcggaggtcggaccagttgttaggtgttgcacgaagggaaaaggaagagcacgatggctcgcggtggaggaatgaatctagacgtgaagagggaaggatgcgcccttattcgaggaagggaataactcttgagtaaaacgtatatttctcatgcctttattatgtagtagcaaggcttcatggtgaatgtgattcaaaggtgttttgatgataacaatgatgacaacaaaagatgatgacaaaggtgatgaacaaaaagctcaaagatcaaagaacaactcaagtgaatcaaagaacatctcaagtgaatcaagaacaagtcaagagttcaagaattaagaagaattcaagactcaagaagaaagcctagaatcaagaatcaagattcaagatctcaagaatcaagatcaagattcaagaatgaagaaaagactcaatcaagataagtattaaaaagttttttcaaaactttgaatagtacatggttttttgacaaaacctttaccaaagagtttttactctctggtaatcgattaccatattattgtaatcgtttactagtagcaaaatgagtttgaaaaagttttcaaactgagtttacaacgttccaattattttcaaaaggctgtaatcgattacaatgttttggtaatcgattaccaatgctcttgaacgttgaaattcaaatttaaatgtgaagagtcacatcttttcactcaaaagctttgtgtaatcgattacacttatttggtaatcgattaccagtgactgtttctgaaaaaatcaaaagatgtaactcttcaaaaaggttttgactatttcaaatgggttttaagtttttctaaaagttataactcttctgaatggtcttcttgacaagacatgaagagtctataaaagcaaggctttgttttacatttcaacgatcaaaaatactttttgcttttccaatcaatcctttacaagccttgaaatctctttgaacttcttcttcttctttgtaccaaaaagctttctgaagttttctggttttctaaaccttgaaaacttgtgctattcatccttttcattctcttctccctttgccaaaaagaattcgtcaaggactaaccgcctgaattctttttgtgtctcttttctcccttttccaaaagaacaaaggactaacagcctgaattcttttgtgtctcccttctcccttgtcaaagaattcaaaacgacacagtctgagaattcttttgattctttcctttccctaatacaaaagtgttcaaaggactaaccgcctgagaattcttttgtatctccattcacaaagtatcaaaggtttaacaacctgagatctttgtcttaacacattggagggtacatcctttgtggtacaagtagatggtacatctacttgggtttgactgagaacaagagatggtacgtctcttgtggatcagttctagtgtagggtatatccactaggttcaaagagaacaaggaaggatacatcccttgtggatctttgcttgtaaaagaatttttacaaggttgaaagaaagctcaaggaccgcaggtcgcttggggactggatgtagacacaagttgttgccgaaccagtataaaaactcgtgtgtgtttgtttccttcttccctactcttttactttccgctgtgcatttaattttcgcttttactttttgttaagtttctcttctactcctcattctcttaacaatttagtaaaagccttaaaagaataattttttaattggtaaaagtttaaaaataattaattcaatctcccttcttaattattttgagaccactcgatccaagatattataatgtatatcagccttttatagctagtggtacatgccaggataactgccctgcctaattctgttgtaactattaattcttatcatcacgtgctttattattatttcatgtacaagcttttattccctcccggtaaacccgtcacgtgatagtcacgtaagtgcagaggcactttcttggcacgcacaggtctcgtgctgctgctaacattaaacttcataaatgactttaatgactaataaagatattgacgcacaatgactaacaagacggtttttggcctgagaaaatgaagtaagtttttcacactgtgggaaacaaaatttacaccgttagatatattgctttttaaatcaaaggctgaaattatttgctcttttttcctttttttcattttttctctcgttcacaaactaagtgtataataacatattaaatgttcataaataatttttctaaaacaaagaaaaataagagattaaaaatgataaaaaaattataaatataataaatatttgatttaataaaaagataaaaatgaaaggtgtcataaatgttttagatgagcaaggatcactaattgaaacaaattcaacttaaaaaattaagtctacaagtttaaagtttggaaaccaaatggtataatatttagaggacaagtcaatgtcaaactgagaatcaactctgtttccacagcttagccaacttatccaacgaagcacgtgatgttccgccttcagccattgcttccgcagcactcattttcatcttgaaaatcctctgacgaatctctttccctttgtctgattccatgagttccctaactcggtcccccaactcagtcgaactcacgaacccatccttgttctctttcaccgccaaagccaccttcatttccttcaccataaccatcctgttcatcttctgctccgcgtagagaggccacgccaccatcggcaccccttcacacaccgcttccaacaccgagttccaaccgcagtgagtcacgaacccacccaccgagtcgtgactcagaatcgccgcctgtggggcccagtccctcaccaccattcccttctccttggtcctctccaaaaacccttctggcaacaactcgtccagactcagttcctccgccgagtcatcagcaccacccaactcggttctcacaacccacaagaacctttgctcactcttctccaacccaatagctatctccttcaactgagccctcgagaaccttcccatgcttccgaaacacagcaacacgacgctctgactcggttgcaagtttagccaactcagacaccctttgtcttcttctccatacggtgcagaaatcacgggtccgacacaaaacaagggtggtggtactgtcgcatcctcacttaacgctctgatggcttcttcttcaatggcttcaaatgtgtttactataatcccggcaccacccatcatggtttccgctatctgaaggaagacttggcaaacgtaactcaaagggtctttgcattcgtttggaaaatcatcggctgtaattgtgggtaatccagggatttggatttgcaaaggttggtctttgtcctttttttctataaggacttggttaatgggggggtagtaaaggagtaaagcgagaggggaggcgccggaagtgtagtagaagtaagtggggacgttgttgttgagattttcagtgagggctttggggtcgttgaagttcatgaagtccatgacgatggctttgaggttcgaagctttggcgagggtttggagtgcaacggcgatgttttgcgtgctgtggcgggtgagttcgagggagaggaggtgaggggggaggaagggggtgttgaaggggagtgcggcgaggggaacgcggtggaacgtgatggagggagtggtggcggtgacggtggcgatgtattgagcattagagttgcaggctaaggtggtggtggtggaaggggtggtgggaggagtgaggatgagaatagtgatggaaagtgaagggtggtgggtcagtatgagttttcccaactccaccatggaaactaggtgtcccctaccaagattagggtatagaacaatggtgtctttcatgttggagaagaggtatgagtttttgaaatggaattggatctagttccaacaaagatgcttgctctatttatggacagtgagccactctactgttattttttttttttttaaggaaaatgtctggtgagcaccgattgttctatgatacatctaaggatatcgaaggaaaaaaaaaatatagagagatttaataaaatttatggtgcaataagaagaaagacaaaaaaaaaaaatattactcattttttggactaactttgatgacttcatattataaagagaatattcttatttcttaccagtagacaccaagtagtgagtattagatggtttgggattatgattctttctgcatgatatattagttaaaattgtttatctctatttataaaaaatttttagttgtctcttgcattagttttctttttaacgaaatattcttaattattttacataaatattagaaattaataagataactaaaaaattgactaatatgtttagattagatttataatgagaaataatcaattttttatggtgaagacaaaacaaaactattatttatattttttcatggtatcactatgatcttgaggagtagaattgattcttgaaattttgaaactattcaaatttaaggataattaatatatatatatatatatatatatatatatatatatatatataaattattaacaaatttaatgttattaattaattagacaatcaattttcttaatatgtatgaataagttaaaagtgttttatatgtgcttaaggatgaatatagtatttcatagatattggttgggattataaacacacaatagtttcaacctacttaataatttcttgacaattataacacttatttaatacctacgagaaatataaaaatatagtaagtgatataataagaaaataaaataataattattaataaagtatataagattagaacgtgtctaaatatatcatttttcttatattatttaatgagatagtggttcatatatattataattatttttgttctttcagaatgagaaaagtataagaggagtgatccacacatatttattttatttttaataaattttaaatcatattaaaaaaatatgttagtagtatttttcaaatgcatttagaagtgaagaacaagaagagaaaattttactttttgatctttatttaacaagggagttattggtttaactaattatatatggtaaaattgtaaatttgatcccccaatttatctttagttttatatttgatcctcaatgatttaattcacaaatttaattttctcattttgtaaaatcgtgcaatgtttgtccccagaccacaattgaacattgatcattgtgatgttgattgtcatgtgtcacgttcttattggataatgactgtcacgtgtcatgttctgattggatatcaactccataaaagatgaaatgaattgttattttcattgaccaatcagaacataacacgtgacagtcatcgtctactaaaaacatgacatgtgacaatcaacatcatttgttaaccgtcaacgtctaattgtggcctgggatcaatattacacgattttacaaaataagaggattaaatttgtaaattaaattattgggggatcaaatttaaaactgaagataaactgagaaaccaaaaatacaattttaccattatatatatgcatcttaagttgctctaatgctatttctagtgataatgaagaactgtagtgtcacgagacatgattccaatcaattgatgcatatacatttactattacacgaaagttattctacacctccatttattgcattgattcattaataatcggtgtagtataaaatacattgacattttgtaaattaaaacaaaaattattacaccaactttatataaagtgatacaaattaaatttatatatttttagtatatatgttaattactatagagccttttaaagaatatcttttaaggataataatctaaatataaagtaaactttatattttaatacaagagggaaagcgttaacataatactaggaacatattttttaacacatctttttatttattgaaatttattaaaaatgataaaatttgatggatttcaaatcatatttaattactgcctctcttgattttataattttttaataaattttaacataaataaatattaatcaatacacttaggacattaattaaagaattaatatatatatatatatatatatatattaaaatacataaaattatattatttataatttttctctctcttataatcctcataataattttttttacttttaattctttaatctatacttaaaaacacatttattactaagacccttgaccatatgagaaaggaggaagctgtcgtactcactacacatcccttaaggaaggggccgggacaatttaccttaatgacattaagttaaatacacttttttttttttttgctgaatgattaagttaaatacactgcactgagaaatctcgagaaagtattattttctctataaaataagataatgactgattgactgttgtcatttgtctagaattcaagtacgttgtttattcatgttaagttttcttctcattgtggactctgataaaacgtgtggatgtgatgacgggtttgtgtttttccactcctaataagaattattttaaaatatttctatatgcataattaagtattttatacttttatacatattatttgatacttaatatttatttactttatacatatgcctattttatcccattattgaagtgtaaaaataataaaataagataatctctctatatattataaaatttttattcagcatattatttaatataaatttataataattttcgcttgtaaatttaaattatattatcaattaagatgttaaatattaaatattagaattcaaattatcataatttttaaaataaatattcttttactaattttaagaataagaaaagtaataacatgacaaaaaatattttttataatttagattaaattatactttttataatttgtgaaattaaaaaataaattaaatttacatttataaaattatacataatttttacaaaataatgattttgtcatttgaacctaatttatatcttatactattattatctaattcatgtcaaatacgagacaggataacacaataataccattgggccacaataatgggtttattgtaccccaaacattagacagttaaagttcattgtcattttatcatatcctactcatatgatatcctaattaccaaataagctgtaagttttttgggtattactctttaactaaaagttaaattttcataagtgctttagtaattattataatgtgttctcatttttaatataattttaatattatttttatttacaaaatttctatttatttattccttaattattatctttaaaattatttaaaatatattaaactaaaattatgattttagctcaataactcattcaaataaatatcaataaattaaagtacgataatgattataaaaataaaactttaattttatgtttaaaaatatttttttcaaatatatttgtgagactccaatttgaacgtccctctcctcctcgtgcatagttcttcatagctggaaataattattgatggattggtggtcccaaaatagaatgcatgattggggcgggtctgtaagaagagcttcttctagaacgaacctttaatcatgacgaacaagtaatcaagattacctttattggaagatcttctcgaacgcatgcttaagattacgtgaatgtggtacataccataacatatttttttatttaaaggaattggaggaacggtacccactaacatggtgctggtgatatatgcttgtaaaatatttttttttatttctcattttgtctgcgtatgatgatcatcttgcacttggtggctagttatagtatccaagctactttcattttaaatcattaaggtcttctttctatcttgactgctggggaatctgaagtctgaaaattaaggattaaggttttcttatttttactttattaatattgttttatttgcaggtgaaaagctgcttaagaccaactgtaagatatatgtgtcctcaatggagttgggattttttctgcataaatcatttatttatgttatgcaggccctttctatacatagttgaatttatagtttaattagtttggttgagaatgtggaagtctacttttggttgcttttgcaggggaatgaaagtgtctttgttggtgaagggtaggtgagagaaatgaaaggtgtgttgggttgaataggtataggatcaatgagcaacaacaaagcacgaaaggtggtgtgtgtgacgggtgcttctatattaatcttttctattattagaatttttctcttttctattattttattagatttttatttttattttttaaaaaaagacattttaaaatgatttttttgaaaaatcatgttagaaggacactttttttagatgattttttgaaacctatctaaaattaaagactatcaacattatttatatgttgtttaaaattgtcatgttttttttgctgtagtgaatcttaaacaaaaataaatatgaaatagagtatataaattataaacattgactgagagcatgaaacataagtattgattattttatcaattattattaatttttatcctattaaacatataacttagtcatttataatttattatgttctaatttcttataattttatattattttattactcagaatgatacataatattaaacaaaaatttaattactaccgatttgactacaattcagccatggttaaatcattaaatctcgaatagtgttttcatcaatttaatcaggtcttaaaaacattagctaaaacagtatatgatttccgtcagaaccaatttttcgatacatatgggagagttatcagcttgcaagaactaaatgttaagctgctcaggaaccttgcatgtcccaaattcttttttttttctcttccccacacgtatgttttttcaatattgtagttctatttgagagaatgttgtacactaaatatagacaactttttcaataagaatttaaattataatattcggagagattagccttttctactaaaaccaactcctattggtagtacgctactatatccccaaatccttttaacattatacaaattaagccaatcaaacggttcattagctttgtggttttgtaattacctgtaattaataagtgttgtttagggtccaaacagccgtgggcatctcaataattcagatggaaaagcttgccactcttttatgactcgagactcttgatatcccttttaactaaacctttgtttctcttctcaaccacgagtgctgctctaatcacaagactctcacatttcactctgacaacactcttgctggcttctgctatacaaataatcggtactgagatttttattttcacattggttattctatttagttgtgacatgttcttatcaagatttttcttatttctccctcttcctctctttctgtttttgatgcaaaatctcgatgctaataaggtgcttaacttaaaaaaaagagagcataaaaataaataatacatataagtaggatctacttaataatccaaaaaaaaatctacattaaaaatggccaaataggtgtcataggtgttaatttataatcttatagtgtgcaagtccaactatcattgtttatagtagtatatatatacaccacagtggagactaacaaccaaacgcaaaagcaatgaaagaagctgtagttttctaccctgcacctctcataggtcacttagtctccaccatagaactatgcaagttcatcctcactcaccaaccatccctctctattcacatcctcataaccatagcaccctacgacacatcctccacttccaactacatctccaccgtctccaccaccctcccttccattactttccacaccctccccaccttcacccccccacaaacccttctctcttcctcactcaaccacgaaaccctcttgttccatgtcctccaccacaacaaccctcacatccaccaaaccctactttccctctcccaaacccacaccctccatgccctcatcgtagacatcttatcctcccaatctatttccgttgcttcacaactcaacctcccttgttaccttttcgtcccagcaagtgcttcactcctcgctgcttttctctaccacagcacactccatgaaacctaccacaagagtttcaaagatctcaacaacacctttctcaacattcccggtgtcccaccaatgccagcgagggacatgccaaaacccttgctcgaacgcaacgatgaagtttacaaaaactttttgagttgtagtcttgcagcacccaaagccgcaggccttatcgtcaacacgttcgaagctcttgaaccaagtagcaccaaagcaatttgtgacggtttgtgcttaccgaattccccaacctcacccctttattgtttgggtcctctagtaaccaccactgaacaaaaccaaaacaactccagcgaccatgaatgtttaaggtggctggacttgcaacctagtaagagtgtcgtgtttctctgttttggaagcttgggtgtgttttctagagagcagctatgtgaaatcgctatcgggttggagaaaagtgaacaacgatttttatgggtagtgcgaaaccccgttagcgaccaaaagcataaccttgctttgggaacacaagaggaccctgatttggagtttttgctgccaaagggtttcttggacagaaccaaagaaaaggggttagtcgtgaaaaactgggtcccacaagcggcggtgctgagtcatgactcggtgggtgggtttgtgagtcactgcgggtggaactcggtgcttgaagcggtgtgtgctggggtgcccatgatagcatggccgctttacgcggagcagaggttcaatagggtggtgttggtggaggaaatgaaggttgcactgtggatgcatgagtctgcagagtcgggttttgtggcggcgattgaggtggagaagcgagttagggagttgatggaatcggagagaggtgagcgagtcaggaaccgagtcagggttgcgaaggatgaagccaaggctgctacaagagaaggtgggtcttcgcgtgtggcattagacaaacttctcaagtcatggaaagaaagagacaaagtgtgtgtcagttaaatgaatgaagacatgctttacattgtacaattttatgatattactaaaatattgcttcctctttattaatagttcaggttatgtctgaccagagtcacatgcaatgtaagttgctaccgtcttcttttttgtttgggaaatatgagaattagttgagaactatggttatattggatttgcgtcatttaatatagtttttgcaaatttagcaattattactttcttttaaactactagtcaattattaaagcatagatagagaaaaaaattagaatgttaaagcatttaaggaaagtttaataatgatttttacatataaaaatcaaattgagaatttataacaaagagagactaattgtagtttactcatgagtaaaaacattcattatatagtaatacataaaagattcatatgtcagaaaaacaaagaaagcgcattttcctagtatttaaccctgcacgttaccacctttttatcaacataaaaacaaaattgcttttttgtccagaagctgtgttccatattacataacagtatagactaaatcgagaaatttacgactcctttagagaataaattatgtttaacataaagttaataaataataatgattctttttgaaattttttcaaccctaaatacatattactttttgaaataagtaattggatcttcaatagattttttccataaatgtatcataaaaatatttatcaatccttatatgacagaagattaataaccaaagaatattgaatagtgtgtctttggattaattcttcaaatcttaaatgaaataaaaaaataaattattatttaggcttggttatatacgacggtcacatacatgcgctttatttttcctgtctttatatatatatttcctgtctttaatattatttatgtttttcatttttataaaactatttttttaatcttcataaattatgtttttattttttaaaattttcaaaattaaagcactttgaacagtgcaaaatgttatctaaaatactatgaacataatttgcaaagtactattttttttttttacaaaaacgataagtaaagaaacactaaataacaaggacttaaaaaagtatttaaatctaattaagcattatataatcatatatagattcaaacttaactaatctgtctaaaatataaacaaattaacttgatccagtaattaatataacaaataattcaatttatttgcatccctgcttttctatataccggagttaaaatgaatggcacgccaagggataataataagcatttcatttcgttcatacattctggatctattaacaaaagacaacaaagtaacccatctctacagcaaaatgataatgacaaaagaggaatccataccataaagaaatacacatttggcctacctacatgttgagcctagctacttttccaactatatggagccattgaaaacttcaatgataaaaaatattgaatgtaggaaagaatacagagccaagtggtgaagagactgaggttttgctgaagagcattctcctcttttcatctcaatctcagcctcagacaaatcaatataaagaattgtacgtaaaacatgttgcaaggatggaagttacacagatgaagagtgaaggaaggagggtcacattaaggagcatactctgacgaacgtacccggcaagggtaatagttgcatcagcaaccaccctagcaagtgtccctgcctccgtagacaaaagtccaccgttgtaggttccacgagaaagcctcgatgacattactcgcgaaagcagtgacaagttgacacctggaatggatgaaagtgcaaggttatacaaatcaacaacactctggtaaggaaaaacaatatacatcagcaactaccaaaacccttttgatgtttgtgtcagcaaggagctataacattgtgtccttatcccactggcatcaaaagttcatgtctaacaatgactaaatgaccatctgatcatgggttatgcagttataattaagccatcagtattctcatgaagcttgatatattagttggacagatacagaagcggcacaaatgagccttacaaagcctaacttgtttcatgttccttgatgaaatgtcttgtcttttagtttttaaaacagaaaggtggaatccatcaaaagaagtgatataaggctcaaagaaaagaatgggaaacagcctggtggtcaaaatatgtaattcaaaaatctcagttggaaaattaatatcatataacattgacatttgggaatttaatcgaactaagatcataagtgaaagacaaccacatgctatttattgcccctgaaataatagtataatactgttcatgatgctaaaaagttagatatgttttatcagtttttattactgaaatttcctggtttcacataatgggacaaaacattatagcctaacttcattatggtcatattcctaaccaaatgtaggatatcttaaagcattgcttccctagttcctttgcatttctacaatacaaatctgtccataataaaaaataataaagcaaaataagatcttaccttcaagtacttcggcagaaacaaataaaaggagacccgaacagatgtattgtggctcagaatatggaatgattacttggaaactcagtagaacgcctatgagaaccataatttctgatgccaacagaatttgcctaaaacagattaaaaataatctcagatgcacatggaaaatatttcaacaattttaaggctctaaagggttctttaagactgagtgaggatctaaaatctctagattttttttccttctcattttattaaatatcaactgagtgaagctctaaatatcattctatatctttcagcaaatccagctagagcattaatctgattatggatcacaatcaaatgaagtatgggttttattagacattacctgtcctggaacatgttgcttatatagcttccaacaacaatgtttacaggaagaactgtcaagccaaggcaagcaagaaaaactgcaactgtgcttgttgaccagttgaagtagtatgttgtaatgacactagattccgatagcaaaatctccattacatatttgagcatgaaatatattattaattgaacctggagattttacacaaattttgtcaggtaaattgtttaactttttaattttttttatctaaccatcatattccactggaacatggtgaactataatatcagaaaaatatcacaagagatcttatacaatccaaaatggtacttaataagctcagtgatacatatgatcttgacaattatttaacaattactatatcccaacttcaaaagaggatcgtatctgttatctgtatcagaaaaatatcacaagagatcttatacaatccaaaatggtacttaataagctcagtgatacatatgatcttgacaattatttaacaattactatatcccaacttcaaaagaggatcgtatctgttatctggcaagtggcacatgagtctatttcacaagttttcagccgtcagaaattatatatgtaaatgcaattagcagtttaatttatatttataattttttttacatataactagtctttcatactcatacaggaacatacgcgtgtcacttttacatcaataaattagttttccatcttaagattaacaataagttaaagcttataaatcatctaatgaagtaattttttatagatagaaatccaatataatagcggtgacaggaagttgctcacaaacctttacagaaggtgtaaggagtctgtatgccattctaattgaattcactggctggcgagattcctctggtgcttcttcactatcatcacaatcttggtcagcatcttcatctaccttattctctgaactaatcagtaatggttgttttaagcctttctcaagtgcattgtttacttctggacagatgaaaaactgtgtcattttctattactagtattgacgctcatcagaatgataaaactcatgacaagaaaatacatgtaaccatcacataaagtaaagtaataatacaatcagagatgatttttataaatattgatcggattgatagacagaggccattgaagccagaaatatcattagtttactaacttgctagatatagcattccaaagaaagatgctaatatagagattaatggataacacctttttaagattctaagtctaattttctaatttcacttgcttagtagctgtgatgtgtatcgtgtagaatatcaaaggacaacaaaatatgtagcaatttagcattacatgtattaggaccaaagtggcacaaggaaaaattcacaacaaataccaatcaagattcaagactcaacaaaataagggtaaaatttacaaagcccttctgagctaaagacgatacataccaacataaacatctaatagaggttatcagtgaatagcataataggaggtagctaggatatggagaggtcattgattcgtccacaaccatttccaatatatattaaaaaataaaactcaatagaatcaattaggaagtgatcattgactcaagtgatagtattgacatgctgatcaccattttgaacccatacttcatgatttttaaaaattccaagtcccaacaaatcaaccattcaagtgattcagcaataaatgtattagaaagaacgtagtagcacccattgaaacagaatctcacctaaaagatggtttgaacaggtgaatagaagaccagtaagaaaagtagatcagacagaaaataactaaataaataggtggagtaggaaaactagtgaaaaatctaagagaaaccatagtaaaaggaccaggatctaaatggcctttttaagtttttgacataagacaatgacattatttgattgatgtagtcatcacatcgttgttgccaaaagtcccaataatcaacctcttttgtatagcaacttttttccctcacttttgatgaacaagagtatgatctattatgtttatggactactttcatttatttttaagattctcaaaataaatcaataatcagtgcgatagacagattcatgatttttagaaaatttcagccaaaaacataaggaaccaaatactttaagtcttaaacaataagtaaaaagctgatgcaatataagttcagtaccatcatttgattgatgtggggagtgatcctcttcagcttcacgagaaggttccttaaaagtgatccacaaccatacaagatatatcagccaagcaacagccataacccacccaggcaaggtattctgattaaatgtaagcttggaaattttaaaattaatttgcagtatgccagctaatgcaggaccacaagccattccaagagcactagcactaacaaaacctgctgatgcttgcatgcggatttttaacggcacacaatcactgatatatcgccggttaacagctctggcagaaccaaatctgcaataataatcaagtgtttgtcagtcataaaaggtcttaatgtgactagtacctcataatattcttagcataatgataatggtaatcaatgtaagtacttttgaactcaaacacagaacataatttgtgaaaaccatgaaataatggtatactaagattcctattttaaaatctattttgtaacctcttttaattccaattaggattagcattgcatggattcaatttacgatgtgtcttattctggattactgaaaatggtaataagcctagtggtgagacttgagtgagagatttaatcttatctaaagttaatacacaatacaataaattatgttcatcaagtaatgaatgacaagaggaattaagaaatgaaagattgcttacccacataacagccgaccaattaagagaatccatattgaactaacatcatatgccaaggcatacaagatatttccaagaaaaagaactatgctactgaatacaagaggcctaaagtatgacttgtttgaccatgcactaaaatacactgatgaaaacacttgtgcaacagccattgccccaatcacaatcccacaaactgttggcgcggccccaaggctcatagagtaatcatctgctgttgggacaataatatatgtattgaccatatataaaaatgtgtttgccaggttcaggagaagagacataaaatggtatcgttgatcatcaacatgttcctcagtagggctaggcagctcttcttgcataatgagtgcatgctgccccaaaaagttaaggaagtttgtcgagttggttaacctatcaacagctgcatttattgaatccacgactggatcctgcatacaagaccaagtatatatgatgaaaaatccccaccaaccatgtgctgctacagggatacctaaccagcagcctgcctgagaacattagcaaagaacataacaaacaaagtgtatgctggagcaaactaaatgctaaagagacctggaggggaagggtaggttgatcataaattgataagtaactcccttgacggtcctgaagatcatgaagattgcgagataaggcccccacaacagctcccaatccctgcaaattccatatcagccagtcaacattcatacttcaaaactatagactgttaattaaaacccattagtagttacttacaatagatttgttaggtagctatttgttagctatacatatcagtgaaggtgagctagttacttggggctgggataactagagaaataaggcatctagccctataaataagagggggggaaggggtgaagagagagatcatgttgtcatttgtgagagaaatggtgcctttaggcattcggaggtgcaaacccccaaagttcaccaagttaggcactggactgaggggagaaatcccttgttctttcttaagtaaaacaccagttttctatcagctatatgggagttcatcagttatgtatttaattaattaattctgaaaaagtcattcttgaacaaaacatattaccacatgcttgaacacttgttgcagctgggagtaaggatgatttgcacgagttttgacatagtaatctgtgaatctatagccaaagcgtttatcaaacttcttcaatatcttgcgcaaaccaatagcattgatctccacaaaaaagagaagctttaatagatcttgtcccaatgctctataagcttctcgtaattcaattattttgcttatttcaggctcctcctgaagagcatcacgttgttctccaagctttgttatctggcatgccaagagtccttgttgctccaacaagaaaaggacaatcttctcaatctgaattgcaacaaagggaggtgattgaaagttgaaacaaatgtgcaacatacaagattcccaacaacatatcaacaaaacagtttgataacaattatgattcattctactcagataatcagattcactcatagaatcaaatttgggcattaaaagtaatggaaaggttcaaccctcattcagtattgcagaattaagcattcaacaaagaaaacagaaaaacctgattatccagcattcgtgagaaatccttgagtacatgccgccgatctagtgctccaagttgaatttgttgggcatactgcttgactcgcttcttcatgagtttgtagtttatgtaatatctagagcaaaaaaatataatcaaacctatgagcctaaagtaccattatcgcaggactaatgtctaatattaaactccgaagtttataacccccaacacagcatacccttgccattcttgaatttgtctgtctttcaacttctttccaaaggcaaccatcactttcagcaattggaaaggctttgctcaatggaagcaaactaaatcaatcaaccattaaaaagggtcaaactcgttacatcgaaaccaaaaccatgaaaatcaaaacaagttcagttcacaaagaaccatttcaatcaggaacaacacaacttggccttaatccaacatcaacataataatctttttctagttacaaaaatgctaaaaggcatgcagagagaggctcccccatttaaagatgcaaaacatatcacacgtatcatcaaaggcttaaagtgttacttacaaataacaattcagagttgctggcaaataaaatataagctttacaacacatgaatctgctcagtgcacacccacttcgaaattcaattatttatacctcaatagcatgttactttaatgaatacacaacctttacagaacaaacacggcaaaacacccatgccagaaaaatttaaacatataagcccaaaaacaaaaagaaagaaacgaagaaaaattcaaataaaaaatactttaaattattgaaagttatgattttgaatctgatagtcatactggggttcagttgctcacagctcaggaacaaaaacacgcgatttctgtttatttttggcgtttttttcttcctttttgttgaagatttttaaccaccaacagttgcagcactaacaacaatcaaaattatatgtggaggaagatagcatggggtgccaatagtaacaaattaataaaatcaccacgaaaaaaacaagggaaaataagactacataagagtttttttttataggctaactggctaaggctataaaataattaccaaagcaaatttggtaatttatatgaactaatcattcaaaagaagaaattagaaggaaaaaaaaattgtaacaaattttatcaacgaaaagaagaaagaaaatgattgggaataaaagaaacaaaaagataagcacccctcaactcggatagggcagagaagagagaataacaggttccgtattgtgcaatagccgccataatttaatttcaattacctttcactagaaaaatttaggagaataacttcatgaaatttatatttgttgaacatgatataattgaaaatttgaaaataagactaaattaaattttgaatctttgttatttaaaaaatatttattatttattaaaaatgatatttttatttttgagattttttaattattttatttgatttccttttttaaagaaaaaaagataaatatgaaaattaagctgagtattacataaattaaatacatgaagacggtgaaaattacataaatataaaataatatgcatataaatatttaaatacttgtgataacatattcctaataatttattctaagatgactgcttatggatatgcttgattggcaacaacccccttcctccctcacccaaattttgtttgctttctgagcaattatttaaacatgtttaaattttaattatttttaacaatgtttaaatttttactgaatcataaattaagtatggggtaaattacaattttgatttttttattaatattaacccgtaattttagtgtctactttttaaaaattacaatttttgtttcatcttcaattttgtatatgtttactttttaatttttatatcttaattaattaaattatttcttcattatacattaaataaatatgttagatataggttttaattggaataaaataaaaaaataaatatatacaaaatttataatttaaccaaaattgtaaaatttttaaaatgcaagactaaatcacatgaataaaaaataaaaataaataaaattacaaataaaaattaaaagaaattaaaattaaaatttatcctttattatttatttaagagaaataatattgttgtatgtgtatcaaatctctttattcaaaagctttatccctggcagttttttttatctaattaggataagattatttttctaaaatgtttgacaacataattttagctgtctatttttttttaattttatagtaaatatttaataaaataagaggtattttatttcaaaagtagcatatgtcgacaaacacgagatgtatattttttacaggtaaaaaatataaagaggaaaaaaatactttttctctttaattatttagacgaagaggacattaaaaaaattagatgccttatttttttcttatttcgttaaaagcaaaagtaagagtaaaaactatttttatattaaatagataaatttatatttcattcaaaaatctagctcttattttcttctgagggttatagagaaaaataattaatcagatctgcatatattttatcttctctcattttctttttattttctgtttcttaaagactgatgcttttaaaaaaaaaagactatgtgtgatagttataatatttgaattaaatataaagaactctaacattgtgggtgcgaagacattttagtctgattagtagtgcataaataagcatgtgtttaaatgaatgcgagatatttatcaaataccatccatataagaatatgaatatatatggatcctaaaaatacaagtattgtaatttgtggattgaataaaataaatgtttatgctatataattataatttgtaataaataatcatttctaaatttataattatattataattaaaatgtgtaataaataaatcatctttggacatgtaaattatattttgaattatgataaataatttattttgtaatatattatattattatttttaattattgataatttttaaataaaaaatattctaatccaagttaaaactaaagatattagaaaagatagacttaaagagataagaggttaaattaactcattcaattaatataatatattaacatataatattgaagtcatgagtttctgtccaaattttgtactgtttaggcatacttttattgacaaaacttacttttgtgttaggtaggggctcaacaaattaattagatgtgaaaaggaaattaaaaactcaattttgagagccaattagcacctccatgaagagcacgaccgcgttgatacctcaagtgccaaccccatgagcagcacatatgttacacatgtcaataattcttgttattttagtaagtttcaatcaatacaaaaatgtgtttaacagaaacataaagaatgttagcatgttactatctaatataagcaatttgattttataattatataatgttatcacattaaaaatttcagaacaacaaacaagttataattattaattaatatttatacttattattatatttattctaatttatatatatttttctattttttaaatatttattataatattatacttacaaccataaaaacaaaaaaagataaagattgaattatattttatttttaaatgaaacaaaatttggagtttaaaagattagtcttattaacattttaattcaatctattcagtagtcatgttagacaataatctttatgacatttttttttcatctgtgtcatgtaagcttttttattaatgataatggacgaaaattaacagatgaataaatttgtcgtattttttttactttcagaaactaaaatttaaatttttatattgtgtgaacgaatttatcgacgctctatacatttatgaatgaaaataactatttatcctttaataaaacaatttttcaactttcaaactaatttttcacgcttggtactaattttactacacataacttagatgtctatatttgtgtatagacatgatacacacgcacgcactatcactacgccatcatttttgttttctcactatccctcacacctttgccttcaacggttcccctttatttcttactattcttaatacatgcacgttctgctttcactttgcattacggacgagacctgcgttgtgcttctgttgcactctttgttgtggtaatacggttcagcaacaaccaagaatcatatataccaatctgatgaatgccccaaaatgttcaaaactgaacgtggtaattggtttgaagactagtaaattaaagaagctacatgtcatcagtgccatttcgtctttgcggatatatatatatatatatatatatatatatatatatatatatatatatatatatatatatatatatataaaatacaagctccttagaccttagtcacaacaagatacaaaaacacgtcaaatatgatcaatcaaatggccacttcctgagtggtgcagctctaaattaaacacagatcttaacctacccgttgagcatgcatctcaacaaattaaatgaaagcaaatgataaaaaagaagcacaatccttcaatgtgagttatctactggagtacataaaggtgaaatcctgatcttggttccaagcacatcatttggcttgaacgttgaaagcatctgttttttttttttttcatgtaactattttgaaaatgccaaagagaaaaaaaatgttagcagcgactccactggggatcgaacccagaatctctggttccgtagaccagcgccttatccattgggccatggagtccttgtgctttgttattgcattgaaattatttaactatttaagaaaaatcaacaactttacgtaagaagtacaagttccgaagtaacgcgttgggcagtgcctaggagacattttgcactgcgacgacaaatgataaaaaataaaactaatgatacataaatacttttttattttaaatactttattgaattttttttatttttttttatatctctatctcttcttgcatatctcaacccttattaattatatatttttctctaactttttacccttttctagatgttggatagaatgattgatgttcatcaaacatttttattttctaactcaagaagaacaacttatagctaacaaaaaaatatatttttcttatacatatgaaatgtatagcatgttcacagtcggtttgaattagctagtttacaaaatttaattgattctagagaaataatcttataagtgcattaaaataaaaagacgtacccctcaaaactaaaagatggttgattttgagcataaaattaagagaaaaaaatcaattgaacattatttcaatttcataattaaatctctctctacatatatatatatatatatatatatatatatatatatatatatatatatatatatatatatatatataacatctaatttgattcaatcaaataataaaaataagtttaatggtgatagactatcagaataaaataattatcatttaatcataaataatcattattgatataattttaaagataattttataaaaattcataaacttatgataaacaataatttttaattggagggcattgtcctttttttctcaataaaaattcaataatttttctggtttatgatttttttgtttttttagtttttgttttttttaaattgatttttagtgttcagagcacatttaacccgcattgaacaccctatatagaacctaacaacttttgttgctccctttgattttaagaagtattttttagatatatgtatatgaagagcataaaaaaagtaattatacagtataaattatttgagttaataaaactataaataataagaggatagcctttgcagtcaatctcggataacttgtgggtttttttttcttttgacagaaactgtcctataaaattaccataacataggacataaaaataatgaattgaatccctaacatccaaaggagaaagaaaagcaactaacttaaaacacaaatttccacccctttgtttaattataccctatctatacatatacctcctttacaaaacattttctacaccctaaaaccaaaaattcaacaacaattcaagaacaaaacaatttaatttcccatctgcaccaacgaacccaaaccaaacattccccaattattcaagcatccttgtctgttctcttctctgttgctgcatgataaacacagaagccttgccaacatcatctattgaagccaacaaatcctccaacacccaaagttctggatactcactacactgcaacaacccccaagtttgaggagtttcaaccctagcttatctccaaccaatgatcaaatcatactcagtcaccaaagacctaatcaccaaagccatgtcaggccaatcacactcttctcaatgtaattcacgtaagcctccccaccttcttcttctcctctatatcattcagaatctcagtgtcaagcattccctgccaatcctttgtgttcaactcaacactcaaagccagaaacctaaccacagtgagcctcacattagggttcttggttattctctttgcgaagaaaagcgcttctcaatcatctttccctccaatgaaaagcaaacaaaccgtgtaaggcgtttcaggtgagaaaacgtgcgtcattttagctctttcgattaatgtaccaaccgaacatggtgctctctccatgacacgaaagttcaactctcgtaacgtctcgtcttctatctcgatgcagttcccatcataagaccatttcttatgaaacggtagaacgatgagcgaagtgaacttggtcagggccaaagtgtaaatatcatcgtagttagatgcgtatctcttcatggggtcgtagaggtgggtcaagagcattgacatcgcggtggcgtttaggatgatgcacaccattgccagggagaacacgttatcaggcatgccttgcattataaacaagcaattgaataagaggaatactagtaacatagtctcttgacatactctttcaaacaacactctcctttaaattgcttaaaaaataattaaaaattttaaaatcataataattactccaaggatcaaaggattacagtaggtaattagatatgttatccaaattattataagaccctaatgcatcataaatgtggcccccactccccagactcttttcttcttgagaaaatataaaatcttgttacatttttttatacataaaaattcaataagatataaaaaatttacaataatttatacattatacttaataaattgagctagattagactctctataaatcatgtcatattaatgtacattgttagcaacataacctctaggttattgaaagtaatttgatctaagtttacatgctgtcaatgtaatttttcaagaatttattaaagatttgttcttataccccagaattgattcaatttctatgtcaaacttatgagctggattaacaagctatggattagaatgcttaccatgacatctcttaccaaagagtatccagccatttcgaccacgcctttgcatgttgctgcacaaaggaggcaaagtgcctgcaactattttaacaacactagtcactcaaataataaccagggtttgcaccgtgaattcaccaattcctccattcatcttttctctccaattcatgaagtctctcaggtccaccctcattgcacatgtggtcacaaaagtaggcatcaaaacccaattaacaaaactgtcaatctttttagtgatggcagtgcccaatggaggcccctctggggtagccaagcccaacacaaaaggtccaaagagagcaaaaagccctattcgatgtgtggcataggatgctaacaaaaccaacataagtatgcaatagacctagtgatcactaactggtgaaccctctggggtttattttatgatccaaaacattgcagggcgaatgattaatacaacccataacacaaacaaaactgcagcagtgagggaaaaccaagcccttgatgaatcctgaaacacaattttagagaaagttaggattgttatcaggaacaaattgaacacctcagtaactaaagctgaggattgggctaatctcccaaactccgaattcaggatcttgggatcacttaaaactgtgcaaatggttgggaaaggggtcacggagaacaagccacagagataactccaagttttgtttcctgatcaatgtgtaggtattttgatgagtgaaaatgcacaaaagccatatatgctacatagagagggtgccattatggcaatagaccctatgttggtggcatttcttctactcctgtggaccacactcatgtccgttttgacaccagtatagaagaggaaaagcatgtagccaaatactgaaagtaaccactaatttgccttcagagtaaaaaaaaaaaaaacaagttcctacatttctgagtccatttttcagagaagctaggtagttgcaaagattaggccaacctgatcaaaacacgtaccatcaccatatgttagtcaatattgaaagaaaaaatatattttaacacctaattattaatagacaaatagacaaaaaaagtgtatatatatatatataattaagtgatatgatgtgagaagaaaaaaatatataaaaaatgagaattgtggatagattgttgaaaatattagggagtcaaaatattagcactcatccaaaatagtaacaatggaacatgctaccatatttagtgtaataagaacaattcttgctgcaacacaatgtctatgattttataaacacaatcaatattaaaagcttaaaaatgcattacaataatcaggattaaatgttttttgatttttgaaaatctcacaattttttgttttagtcagtataaaagcatgaattttaaaaagaacaaaaaaaagttttaaattgttatcacgattgcaattccaccatgatcttattgtgagaaattatgaacaaatgtaatcacaagtacaataattttaaaaatcttgatagatgtagtacgctcacaactatttttttgaaccatgataacgagagattaactacataattttattaaatgagagaaacaaaaaggaattaataaaactcttagagagtaaaaaaaaatcttaatgttctcataataataataataataataataataataataataataataataataatattctaaaaaattgtgaattaaaaatgaataaaactttaagtaaaacaaaaaatcgtgatattctcatgattaaaaacacagtaataataaagaggacaagaaattacgtgttattgttcctttaatgttaccttaattttattattggttcatactcaggtaagagttgccaatgccataatttgaaattgacaaagtcgtaggggaaatggatgtggcataaaaatgtgtcgacgcccatggaagtgaatctggggactcctagacgacccagaaagataagacacatctgcatctgcaacattggcaaagcattttctggaagcatgccttttgtggtcctcaatggcatctctgaattcacgagcgggggcaagtccatgcatgttgtaacatcaacatctttatgttcaatgcaacccttgtcttcttctgaattttattatcctctaagcatgagaaataatattatgattcagaagaaagaaaaaaaaacagagagaaggagaggacataccaacgaactccaaactgtacatcacgattacataaatttcaagcacaaatcaaatattaaatgttgaattataaattatactcaatcaagataaatattaataggagatataagaggttgttgagtagttaaaaaaagaaaaaaaaaagattatgaatttaacgtttctactaacataagttaataattaacgtttgttgataaataaataaatattaataacaaactccattctttgttattatcagaaatttataaaatattatatttttatgattgatcaccttttatttaataagtttcttttctagttttataaattttaattaacaataaagtatgttagaaaaaatgcatgactagtactcctcctaaatcactagttttatatttttagttgaataattacatatgaacatttctacattaatattcaagaaaaagaatttatctctcttttcccacatttacagtttttctcttaccaattcctaatccatttttaaaaactattgttgaatatgacgtcatctttgtcctatattaaataatttaaagtaaataattaactccacccttgttgaaaataactacattgtaagatatgaaaatcaatttgccaatatgttataagtttataaactacaccatataatgcctaacaaaaaaaactacatataaacacttttgacttattatgtgcagtagcattctttaattttcttacaattaaagatggcttatatatgctccattaaatttttccgtgaccttaattagtacgtgaacacaatcaattttgagaaaaaaacatgatgaattttatcgactttctttaaataattaacaccacaaatagaggttttttcaatcttttttacacattaatgtttttatttttacttactattttttctggaccaaccaacaatggtagcaatatattcttagtacttaagtgaggaggtatatttgttaaatagcttatcaattatcatttatgacagagaaagatatacggtgaaataataataaagaaaaagagaagagataaaattatatggatgtagttttaacaattattatattatttttataatttgatatataatataatttttgttgattcaataattaaattatagatacatattatttgtgtcaaatttttattaaaattaaacaataaaaaaagtaattaaatgatacatattttcatatatttaaaaatatttatattatgttgattttaatttatatgaataaaatatcaaataattttatatttatatggaaattttcaaatgtgatccatatgaaacaacttttaatccaactaaaattttaaaaaatattattcaagttaaaaaatataaaataatataataattattaaagttatatcattataattataatttcattcattctcagataaaaaaatcctgaatgatagcgagaaataattaaagagaaataagtggaaataactagaaagttgaaaacaaagaattaaaagttcaataaataactagtgcttatccattttttttagtgattaaattgatggtgacagttgggagcaaggtgtactaattcattaattaattggaataacaagataaagggtcaaagaaaaatactaatcaacaatacagtgaacaggacaaagaagttggttatgaactcaaatgagttaagattaagccaataaatgaatagctcacaataatagtaaataatttccagcatcattagcataaaatgagacttgaaagaaatcgccattcacataaaggatttaaactcttaacattatacagtatagcgaaagttcgtttagaattaaacatcataagttcattcaggattacagttaatttccataaccaatcacgtagtgttgagttccagatttaataatagattaaatttaaataattgaattggtacaatgtacaattatattatctttcaagacatcaggattttggaattgttctagtttagaggagaaaagtcatctagtttataactacactgtttttgaattttagcatctatcaatttaagtaattataatatttgatagatgaattatatagtcagttatattaatagaaagcagagcttaaaagggacagtaaaacagaaagttgcaatatattcaccaaagacaacagccttgtcctctcaaccaacaaccatgaattcaggtcctagcgaagacggacacacctcatgaaaataaataaaaaattaaagaaaataagtatctttagttcagcagttaagctaaccaacaaaaacaaaccaaagtataatctcacaccaaaatatgtataacattgatccagaaaatgtcttaatattcccatttcttcaactccatgccatcaggagcacttccctctaccttctttgatcccacttctttccagtttgtagacagcactgtcccattagactcaacctatacaagaaaataatagaaaagagatcaggtgcaatgtacattgcagtatgctgtgaagataaaatttgctggcattctcaatataaattaacaagaaatgagaagatgccacaataaggaattaaaaattggcatatattatgacaaggaattaaggatacaagtgcaaaacttacaaaagactttttcattgccctccttgtatcctcatctgcatcttgatatatttcacggaaaaatttgttcaacgcagcatcgccatcaagcttttcgtctttctcctgaaatgaagaatgttaggagctaagagttgcaaccgttaaattacaaagaattaacacactttacgaagatagcaggcaaacctctttcttgacttgagcttcaatcttgtcccagtctcttgtttgttttgaggacgggtaagaaggtctttgacttccagtaactgcaaaaattcatggaaagggataacacatttttgcaagaaattcatgataaaaattaagagaagggacccaatttaatccatatgccaacaataaggtccaacagcaagaacaattctttgcaaatccctcacagataagaatccaggacaattatgccaacatacaaatttgccaaccattggatgtagtagcccatgggttacatctttttcacaatcagcctatttggcaagttcccagcagctgaaacctattcccatggtttattcctctgtctcagcctttgcaggtcacacccacctctgtttttttgtggtttgtcatcgttgacttattgctatgctattatgctttaaatcaatgataaatgcatgctaaagattcatttgcattgtatctgttgtcattgatatagcattttacccaagttttatttgcattgtatctgctgtcattgatatagcattttacataagttttatttgcattgtatctgctgtcattgatatagcattttaccaaagtcaccaaacaggaaatagaggagcaaacagaggaaggaaactccagaatcaagataaatcttaagtcacctgaagaagcattaaccctctgtggaacaacgatatctgtggtgaattctagagatgtccagtgaataggttctgctttcgcaaggcgaatttcaattttggtggacaaaacttcatatcggcaattggaaggtacaatctgtttgaagaaaaccaaagatcaacacaatatacactcatacagaagtaacagaataacaaaacaaacactaagataaaccatataaaggagtttaaatgcaacttcggcaatacagcttaagaccagaaaaaataaaaataataaagatgaaataaccaaaatttaactatctttctagtattcacattataacaccaccaaaattatagtatatgcttataagcctgttggatacatttgtcccagtgatccaagctttttatactgaaaaagctcttattcatacctttccaaataagcgaggttgaaaagcatatacatcttctccagggacattaatactaacacttagctacagaagaaaaagcaggtacaggggagtcagaatcaccaaaatgaacagaagtgtaacaaaagcaagcataagaagcagtgactgaatattagtataacgtgacccatactatttgttcaccgaagtcaacagtaatgctttcctttgggattttctttgcaaatatggtcacaaccaactgatcaggtttctggtagaattcatgcctgcataaattagatactaaattaaatattgttaaaaaaaacatctgactttacccaaatccttaacttttgggatgtgattagttcttaacacagtatcaaagtctctataatcaagtagtcagaaattaggtccttcctcccctcattaagttaaatttcagcagaaggtttgcactatgcattgttcatgctaaagcctaaaagtgttagacagcaaaccattcatgaacttcatctaataaattaagcatttgggagaagttaatttttaacaacatataacaaatatcaaaagatgtgtgaaataaatataacagcagtagcactcttgaaatatacaataatattcataacaatgaatacacgcaaccatagagtaaaagcaggtttgacctgtatttaggtttagtcactgcaactgttggcttctctagaagatcatcttgttgctgaacatcttttggagtagcatcctgtgttgtggtcttttcctctataataggtatggtataagattcttctgttcaacacaatatgtccatcaagctcatgtcagtttccaagccaaaaatgacataaatccacatttttaccttccaacagtcaagacacaatcattggtcacatataaaacaaattctaaaacatgaaagtaaatccaaaagacaaataagtttcatcaaataaaaagaattttactactagaaagaatagagtttacctgcaatgagcttatcacattctttgatcaaagtagcaaaccttgagttgtctggagacaatgatgcacccacctctagagcagccttagcagtctcatattcctcaagcttcatgcacgcagtactgcaattgatgcaacaaagcaaaaattaaatcaagtatagcacagttgaacaaggataaagaattgagaacatccaatgtaaaaatataaaataggatgcggtgtgatgacgcacagaaagcaatttaaatcaaatttagccacaaatatcctcattacatttaaccatcatataaaataattaagtgttcaaattaaaattgattgagcaagacctcagaatttgcatgatgcagctaaatcagccacattacatatatatcatgcaaccctccttgtcccaggcacacctcaatacctaggcagctaagttgctgcttttgacaacacttaacagaagatttttacaatcacaaattgacatgcacaataagtttgttgtctgttacagtacttatcttaaaagtcatacctatcatttatatacagaaaaaaatcaaagtgaatagtgataattatagtatgattaagaaagggaaaggacaaggtgacggggtacttaccctttccgcaaatatgcttttggtagagaagaattcaattcaattgctttgttagcatcagcaacagcctctgcacaaaagcaagaaaatttagttcccaaaatttagtaattagtaaaacattacaaccacatgtctacaggacgccatgaacacaaaataaacaccataccaaaatttcttgtttttcttcagaaaaaaaaaaaaaaacaagacattagacagtaaaaacaatttcatcttggtcaaatgaaccaacttcaaccatgatgacccaattgaacacagattccgtcgcaagcaaaacccgatgctttatacagaacaggcaaaagggtattcgaaaaacacaaacttttttcaagggagggagagatggtgtaccagtgaagttgttgagtttgatgttggcttgggctcggtcggcgtagagttcggctttgttgggttcgaggtgaatggcctgagaaagaaggtccacggcgagttcgaagtggtcttcgacgaaggcctctttggcttttgcttcgagatcggaagccatgggggagagagagacagacagacagacacggaaagaggaaaaaggaaggttctagagagggaaaacgaaggatcgtgatttggaattggaagagaaagaagaaggaataggaatgaatgaatgattgattgaccagaacgaatgagaggtgagtgggtatagagagaatggaaccggcaaactctgcaagaggaagggagtagactttggcaagtcttcccaaaatcattatattatttataattaatagtaataagatttttctttgaaaatacaaataaaattatattttaattaatcatttaatctttatagtttgatgatttctatcttttagttattatatttttttaagtaaatttttaattcttttttagtccctgcagtctaaaaataatttttttagtttttataatttgtattttattttttttagtccttataatttaaaattgatctttttattttctatactttatgttttaattcttttataattcttactatcaaaacatgagtagtattatcaattacaattaattataaaaatattaataagtaatttataattaatttattataaaataatttataaaaaaataattaataatttataactaatttgtagttaattatttttatatttttttaataaggagtaaaagataattaaaataatagaaactaaatagatcactttcaaagtataagaactaaaaaagaataaaaatacaaatcacatgaacttaaaatattatttttagaactatataaactaaaagataattaaaatataaattaaaaaaactaaaaataccacttgcatgggaataaaaagtataaatcataaatatataaagaccaaatgagtaatttaatctaaaattattaagaatttgtttaattagagattaaagagtagagatttaagaggtaagaataaatttaagagatatgttcttttgaaattaaagataaaattatgggaataagttgtttggataaagatgcatgttaatttctatatttattaacttttaatttgatcccatatagtgtgcaaaagtttaagatttaagaagtaaatttaaattgagattgattaagattatgatctttttaaaatttagttggtctacaaagatatttttaaatcaagcgattggatataaatgattaatgtgttgaagttgaggttgaattatttgggtattacccaagtttcatggtcgaattccggatgtcactgtcatatcccctaatgaatcaaaagattaagacaaaaaaaatctttatataacttgatattattaatattttagtttgttaaacatacaagtaaatctgaattattttgcataattaaattttaaaataaatgaatattttataatcatatatataataattaaaatttataataaataaatttattgtaatttataaattatattttagatatacataaagtatttatattatgatagaaggttatttttaagaaatatagtttttttaaagcgatgaactcacttaagaacaagagtgttcacaagtcatgttggattggattggatttagccacaggtgtttacgggtatgagtcacccactaacccgaactgacccaaactattatgtgaatagtttaagttgagtcatgtatgtatttaagtcataaccgaacctaaccaaccaaaaattgttcatgtatgaattgggtcacagatttagatttatagatcagaccaaaatcgaactaaaccgaaccaataaaattttttagagttatttagtttaactttagatactcctaatattgagactccaaatgttagaactataagagttgagactacaaatgttgaaacttttaattataatattagaattgattttaactattactattccatttgatcataacaactcaaatttttaaattatgtttgataaaattaactgaaaaattagttagaaattgagaaactagtagaaagtcactagttgttaatggaacgttgaaaaaattagtttattaaattataagtattcagtaaaattaactattgaaatagttaaaaaatgataaaaaaaatcatgattttcttaaaaagataataaggaaattgaataaatatattgagaataaaaataaaaaatataaaaaattagagttagagattaaaagttaaaaactaacgttttaaaaaaacgccaaaaactactaagaaattatttaaaaaaattgtttatggaacatgcaaataaaacttttaaccaataaaaaaactaaaaactgtttgacaaaattcccaaagttttcttgttgtaaactcatttaatttttgtaattctctttgcactcattacttaaatctccgtggtctatctgattaattgtgattgattattcaactaatgcataaatccatgtgaaaatgatatttacatactactatattaattaagtgatttggtacttttgtcaaaattctaacacataatcatattaaaataaagaatttaataaacatacataattggtgtaaaagtatcttattttaagttaattattatcaaaattaataaatttatcttatataataatttataattagatgaaaatattgtatatgttatttataattatttattataaaaaatttatattaggtgtaacccatattcttatcttaactagttttgagggtgataacctaaaaaaagttatgcactcacatttaaaaaataataatttatataattaatatatcaatattaaaatatgaactgaataaatatttaaaattcaatacacgatatacacttttaaaaaagattaacgatatatcactcatggggattaattagagtaatgtccacgaaaataccagcgcgcgttcttggccatagatggcttttacattataccaactgtcaaacccaacaactaatctccttaggttatgtttgtcaggctattttagttaattttttagataaaaatttatttgattatttaataaataaattttttaaatagtttttaacggtttttaaaatgttattaaagtattcatttttaaaatgttagtttttaatttttatttttttctatgattattctcaattatatttatttaattttttaattattatttttaaataaattatatttaaaactatttcagtaactaattttaaggaatacattttaggtgcgaaagcaaaacactttttgcactgtggaaagatttacagagcattgaaattggatattattagagttaaaatctatggctgatgattttcttatttttcttttttccaatttgtgatgtggaaacccctttgatgatctctcctctccctcacaagacctagtctgtttttctccacactactgccaacaacaccataatggggtttattgaaacaaaattgaatgagttcctccgtttcaatggctacctcacagatctgtagctgttgatgattcctcttaagcgtggatgctgatggtgatggtatgtcttcgatctcgggtttgacctcgatgacaaagacaccggtaacttggtcggggtcgagggagaagtgagtcgctgattatttgggtgtgtctgtttttctgtttttattttatttttttgtagatttgagaaagatgtctttttttaaaaaaaaatcgagaaagggagtgtggcttccaaatctgagaaaaagagtgagacatgttgtcgtggttgtggcacagtagtggcttgcgatggtttgtggtgttggttagtggtgggtttcttggcaagttgcggtggtttccttcgatgacgttggtgtggccacaacggtgtcgtcgtcgttggctcagtgctggaaacgaatcgaggtctgaagaggagactagaaggagggaagactttgacatcgaggtcgtcatcggtgttggctccggtggcgccgacgattggaggaggattgtgaaagagaaagcggtggtgtttgttgactgtttttttgtttttgtttttgtgtttaaatttggctgccattgttgaacggaggaggtggggtgttgttcgtaatttccaggtgggagagatgaggacagggccagagttaaattggaaaagacaaaaagataaagaaaatggaaaatgaaaataaaaatttccaaccattcatttaaaatttaatggatatgacggctccaaatttttttgcacagtgccaaaatgtttcactctgcaggtagaattcgtgcggttaattttttaactttcaattagttaatttttttttaattttttggataattttattaaatataagtctaatatttaatatttactagattcaaacaaactagagaaaatgaactcgatcaatcataaagtaactcttgaatctgctgtttacgttttcttcataaagagaaaatgacaacttacaaagagtattggttcttcccttgataacaaggctgaagggaagaagaaaagaatttatgaaaaagaaaagtaatgggatatgtttggtatacgtgtcatgcatgtcaatgatggttgttccttttgttatttcttttggtaaaagttttttttaatcaacaaaataatattaatataatataaataggtaaaagggtacctagaacccatttacataatcaaccaaatgcacaggaaaccactcctggtttttcttttggtaaaagtaatatatatataccaatgttgaaattatgtatagagggtggaaaaggagagaatagagattcgatatagtatttttcttacaagtataatattttatcatgtattgtgatgtgttaatgccatatcgcctgatgataaaacataaagtactatcagaaagtttcattaataataatctataatctataatatatattatagattatttttattgaaaccttttcataatagtattttatattttacgtaatggtatacatcttgtgggagaataattttagcatgcatgagaatatgtgttatttaatttttaccttgtatatttttttatagatcaaactataatcatacatcacaaacaaagttaataattgatccacattgtaagacactcataagtcatagcctagtacctaaaaaaactaagtatataagcgttgatttaagggcgtacaacaaataaggaaccatgctgcatttggtgatggaaaggccgaagaagcatcaaatcatgtttggcatataaaccatatgcaattgggcaagatatcgcagaggaatctcaagctaaattaattagacatctgttctaaaatataattattgtgtgtgtgaatctcaagctaaattgatcagacaaaatttattagaagacaaccaggaatcaggccgagctgatctaaaatatgattagtttacacgttctaactgacataaaatataattaaattacaaaatactgatctaactcatctaaaatataattggtgtgtgacggggttatttttatgtgagggaaaacaaataattgctacattctatcatgaaagataaacattaaaataaactatcaattatcctttggccaagagaaattgggtttgatcatctcaaggtttaatttcagttttgtgatgaaaaaatatgactaagaaatttgatctcataaccaatgattaattagattttttaatagagactatcattagataaactaataaatatttcacattaatattatgatagtccaaaaaattaaaataaataaattattgatttttttaataaaaaaaagtcacaatcttttcaatagtaatataatattaaaatttaactattaatgtatagatgctattgtggaaggatttctatctttgtcacgctctaggcaaatagtcttgatgagtgtgagggaaggtgtggtaaaagttccattatcctcatgattgtcacgttttaggcatgtagttttgatgagagtgagaaaaggtgtagtaaagtccgagaagaagatagtcaagataataagtggggagtaatcctcaccttacaagtcgatttcataggattgaactaaattcatgaaaaaactcacatgagaagaggtgtggtgaagttcaacatcgaataaaaatagtatcaaaactcatcatctttaattttttagtgataacatgatttttttttacaataggtgacaattgttggtatttaaaggcgataagagggacatgctaagcaagagtctcattttaaatcacacatctatcctcgatgagtctcatactataccactatatcaatggtcagtattgagtagaggtgtccatgttgcggtaaatgactaaatggttaggacacaagggtcgataccaatgtctttggattcgataaggatgatatgaattaaatttttaaaaattcaatctaaatctaattaaatggatgggtcaaattcatatttaaaaaaactaatttcaacatgaaattaaattttttaaaagttactaatatacaccttctaaaacttttagtgggactatattaacaacttacactttttcaattagacaaaaataccattttttttagatgagcttaaattgatggggatttatgtaattttaaatattttttgaagctttcgagtgtcactactttctgacttatcatctcgtttcatttcattttcctttcgcattgctagagttgtcagtaaaaatgggcaatccgacctgccctgcattcctttaggaccgtgttttctagtcccaacttaatcctatgtcatgctatctttaaacttatttaaaaataaataaaaagctaaattaaggggagaaattgcatactacttcattataatttagtaccaaattcaaaatgccaaaataaaaatataaatatttttgctttgaaaattcatgtagatctctcccttatttatttgtttttctgcattggaggcctagaggcctaaagaaacctactgaataagtaggtgaactattcaggatgtgctttggaatccaataacatgtgaagtatggattattcttcctataccaacaattttttttacatttaatatattttaaaaaaatttaacttcatcattttttacttattcttttttcccccttctttttctcttttattcctatagcctatggattgacaattttcaagacacttttcatttgaaattttttatgcatttgttggtctctttcttctcctatgcaaagttagtgttgatattgttcacggtgtgtgtttgtcgtccgtgactcctccttaatttttcctccgatagttctttgttgtcctccatatagattgtctttgtttacttcatatagattgttaatctgtatgttttatatggattgacaatccatatgaaccttacggataattcatatgctcatacggattccctcatacatcatgcgaattgccaattcatatgatttaacataataaaaaatgaagatgtatggaaggggatacccagggtggaatgtgtgatggaatgaaagaatgtaggttgattacgacggaggaaatggacgaactcacaacacaacaaggaggggaggaacatactcacgacgcaacaaggaggagaaggaggtgttaatggtgtccgatgtcgtggtacaacaagaaaaaaaggagacatcaatgacgtgagtgattaatatgaaaaaggaatgatatatttgatttttaacttaaagatattttagtttttttattatgcttactgggtctaaagaaagttatgttgggtggaatgaaaaaaataaaaacattgtaattttaacatactttttctctcttacgatataggatcaacttttttggaacttcttgacgggagacttccaagtctcccctaaaatgtcactagtctctccttgatatatatcgtttagaatgctacattatttttaagtcttatttttttaatttaattgattagatattaaattgaaaaataaaagaaaagtgagaaccgaagcaggaattgtaccgttgttgtttagttttcgttacttttactaataagaaaaaatatatactacattaattacattttagcatctcagttgaaatgcataacaaaatatgggtaagtaattagtgcataaaatcttgctcatagtgtttgctaccatcatagatttaggttgtgtttaggacgataacttaaaatattgttaattgatagttgaaactttagatgaaattaaaaatattgaaagttgaatagttaaaaaaatgaaaactgaaaataaataagctaatggattgaatttgaagtaatcaatagtattaactaataaaatctgctcctaacttctcttttaaaaatatatcgattttattagtaaatatttgtaaaaaaaatatgaactaataaaattggtaaatatttaaaagagaaggtaggaacaaattttattttaaaattaaaataaaaattcaatggcatctagatgaaagttttcgttcggaaattaaatttcctttgaaatcgctattttttctaaaaatagtcttatattagtagaaacaaacaagaccacataagtcaatcattatttagacccgttgtagtacctatatgaggtctggttggaaattagctgtgtgctgaacccatctcatagcctgcgtgtgtatatgtttttatataactaatttcataaattttattgaatagatttttttttatatttgattcgtatattacaacattttaaaaattaaatatcctaaaaaatgatttttgttgtctgatttataagataaattgattcaattagggtcatgacaaaattttgccagcttctattttagtctgctttgcttgagataccttgatctgtcatattgctattttggcaaaaaaattccaactcagtttggctctctttctaatttgaaatacttaaatcttgctgggaatgattatctggagggttcaatcccacatcaacttggaaatctctcccagttgcagcatcttgatctcagattcaatcattttgaaggaaataccgtcccaacttgggaacctttcaaatttgcagaagctttatcttggaggatcatatcatggtggtgctctcaaaattgacgatggagatcattggctgcctaatctcatttctttaacccatctttccatatctaaactcaacacttctcatagcttcctccaaatgattgccaagctaccaaaacttagagaactgagtttaagttattgtagcctttccgatcattttatcctttcagtgaggccctccaaattcaacttttctagttccctttccttccttgatctttcccggaacagcttcacgtcatcaatgatactccagtggctgtccaacgtcacttccaaccttgttgagcttgaccttagtggtaacctcttggagggttccacatcaaaccattttggccgtgtaatgaattctcttgagcacctcgaactctcaaataatatatatattcaagggtgaggatttgaaatccttcgcgaatatatgcaccttacattctttatacatgccagcaaaccatttgactgaagaccttccatcaatccttcataatttttccagtggttgtgttaaactctcattacaagatttggatttggcatttaatcaaatcactggctctttacctgacctttcagtattctcgtctctaaaatcattgctttttgatagtaatcaattaagttgaaagatacctgaaggcatcaacttaccctttcatttggaatttctatcaatcggatcaaacgctttagaaggtggaattccaatgataatagcttgagtgaagaatttccaatgataatccatcacttgtctggatgtgctagattctcgctggaagaattgaacgtaaaaggaaatcaaatcaatggtacgcttcctgacctttcaatattttctgccttgaaaacattggatctttcaggaaatcaattaaatggcgaaattccagagagtaacaaattgccatctctgttggagtctttgtcaatgaaatcaaacattttagaaggtggaattccaaaatcatttgggaatgcatgtgctttgtgctcattggacatgtctaataatagcttgagtgaagagtttccactgataatccatcacttgtctggatgtgctagattctcgctacaagaattgaacttaaaaggaaatcaaatcaatggtacacttcctgacctttcaatattctcatctttaaaaatattagatcttgatggaaacaagctaaatggagagattcctaaagatattaaatttccacctcaactggaggaactagatatgcaatcaaattccttaaagggtgtgctcactgactatcattttgctaatatgtctaagttagacttcctggagttatctgagaactctttattggccttggcatttagccaaaattgggtcccaccatttcaattgagctacttaggattgcgatcttgcaagctaggtccagtatttcccaaatggttggaaacacaaaatcaatttttggatattgacatttcaaatgctggaattgcagatatggttccgaagtggttttgggctaaattagcatttggagaattcatttcaatgaatatttcatacaataatattcatggtataattccaaattttccactaaagaatctttaccattccttatttcttggatcaaatcaatttgatggccctattccaccatttctgcgaggttccctgtttcttgatttatccaaaaataaattctcagattctctttcatttttttgtgctaatggtacagatgaaactttgtaccaattagatctttcaaataatcagttctctggaaaaattccagattgttggagccatttcaagtcattatcttatttggacttaagtcacaataatttttcaggaaggatacctacatccatgggatctcttcttcgtcttcaagcattgctattgagaaacaacaacttaacagatgagatacctttctccttgaggagttgcacaaatctagtaatgctagatattgcagaaaacagattatcagggcttatccctgcttgggttgggagcgaattacaagagttgcaacttttaagtttgggaataaataattttcatggaagtttaccattgcaaatttgctacctaagcgacattcaactcttggatctctcactaaacagaatgtctgggcaaattcctaaatgcataaaattttttacttcaatgactcaaaagacatcttcaagagattatcaaggtcattcatataaggtcaatactggaacttatcggatcgtgaaatcatatgatttgaatgcactcttgacgtggaaaggttcagaacaaatgttcaaaaataatgtgttactacttctaaaaagcattgatctctcgagcaatcacttctctggggaaattccactggaaatagataatttatttgaattgatttcattgaatttatcaagaaacaatttgatagggaaaattccttcaaagattggaaagctaacatcacttgaatctcttgatttgtcaagaaaccagttggttggttcaattcctccgagtcttactcaaatttatggactcggcgtgttagatttgtcacataaccatctaactggaaaaattccaactcgagttatgaagataatcttgatctttgtggaccgccacttgagaaattgtgtattgataagtggctagcacaagaaccaaatgttgaagttcaaggggatgaatattcacttttcaatcgtgaattttacatgagtatgacatttggatttgttataagcttttgggtggtgtttggctcaatcttattcaagcgttcttggagacatgcctatttcaagttcttgaacaatctatcagacaatatttatgtcaaggtcgcaatatttgctaataaaatatcaaaggggcatggctgaagcttaacaaggtaataatattgtagcccttccatatatatagtttcttttgcttttcatatagtttatataaatgacagatttcatatatattataattttgaattgtgaccgtaagatttcataattttgaactatttttaatataattaattttgaagagatatgggataatttcaagtcaacagctactagaaagttagacccgtaagttatatgcaagattagttaaattaattaagtttatttgagagatgatatgaatatatatatatatatatatatactgaagttaaaacgtattgaaaatgtggttgggtggtctagtgtttatattcaatactttattttaataaatctatgtcctatgtaatcttttaaaaatttggatgaaaagttttcatgataataaaataaaatagagatataattatagaaaataagttgtgtattaataatattaaattattttatactgtcatctaattattttctagtatgtatgtgataagtttgtggaattttacaaaatttatattaagattaattaatagtataaaactatattgtcattatataatcattaaactcataattattgatgttaaatacttaatcctaaaatattaatgatctccattattactataaattgttttcttgtaaactattgtgattttaatctatcattaacttgatgctattattctaattacttcaatttctagaattttttttataggtataagaattttatttgttttcatttacacattttggaaactaacattctgtttttcttttctttctttctctttttaattttcagtccctcaaagacactagccctcttggatgaccccaatgtctaagcttgttaatgcttggagaaggcaataagttgaaaattatgattgttttacatttcttcactgttaattgagatacttatataatgttttgatagttttaagaagactctagttttattagagttatgcttataatgaaatataaattacaatgtattatatcaatactttacttgcatctttctcttaatcaaaattttggtttgacaaaaacattattgagttaaacatttgataagggcttcattttcaattttttaagaataaaattagaaaatttcttgcacatattttgaatgaatgaatctatgataatcattttgtcataattagaccaacataatttgacaccatatgtttcaattatatggagatcactccaattttcaaactatgcatgccttttattttaagaaagaaacaataataataacaataatctatattattaattattaaagaaaatatctccatttgatatccatattacattggataatttcacctataaatcatttcttaaattttaaaaattttcttctaacctagtgtaactttccactacttctatattgctaattttttttattctatcacttttttttattaaatgtatttttttaactttttaaattattttacttattatttaaaatttagaaagacgtaatctattatctagttattaataaaagaaatatcctttttagtgtccataaattttagacgattatattctttattaattttcaaacatctactatcctctcctaataactatccaccattatcatgttgttagttattttattttaagttctaaatctttttcttttctttattttttatttttatttaaattatgtaaaatgattcagagtgtctctctctaataataataataataataataataataataataataataataattgttggacaagtgactttaataacttaagagagagatgaattaagtcttataaaattttccactaacaaattttaaccccgcctttaactgatatttgataggctcataacgaagaagaagaaggaatcaatttgacaatgttcttctaagtgcgcaagataaaattgattgcaataacataaatgagataatgaaagagaaaaatgcaaagtcgatttatattggttcggccactccccgtgcttacgtccagtcaacacgcattgggatctctcacccttatgttcaaagattctccaagagacaacccatctcttgattacaattgactttctgagatgaacaaaaagattttatctcctttagagtggatgatacaaattgaagttccaaaagaaatttctctcttttagagatgataatacaatttaaagttcttggatgaattcttaatagatttgcaagtgtttgactaagagctgttgagagagcatttgataattaagttctcttggaatattttttcttgttttttcgaagtcagacacacatatatagatccatagtgccttttcaaaaatggtttgaagggatgtgttttttcaaaaagttttttctgaaatttttcactgatgatcgattacaggtttttgataatcaattacacaattatattttgaagggttaagacttttcaaattgaatttcaagagtttcgttgctggtaatcgattacacacatcaatggtaatcgattacaacttttaatttcaaatttcaaaattcttctaaaagctgattttttaaaattgtcttcagtgtaatcgattaccaaagtcttggatgtcttgtaaacactttgttttgaggcaaaaacttgatcttaaattaatctatcttctagtaatcgattacactgtctggtaatcgattaccagagccttaatctctagtaaacactttgttttgagacaaaaaattgatcttgaattaatcttgaaacaatacttatttgttgaagaaaacttgtattaatcttgaagcaatatttaacctttgaatgtttgttgaagtaatcttgaaaataattttgtttgattattctttggcatctcgaaatcatgtattcatacattcacaataataaattcaaacttttgagtgaaatcatcaacaaaaatggcatatgcatcaagattctcttatcttacaaataaatgggtcatgttatatcaagagacttcccggaaaatgtttgaatcaaaatatggttgcatatacaatcatctcaaaatacaggataaaagtagatgccataatgcacagtgtaaatccacccacacatgtggagatgaaccaagatattgtataaaatatccaactgaatatttccaaaagatgagttagtatgagttagtgtgagtcaaatagtataacatcgcataatagcatgaaaaaccatatctattttggaatgtctttaattttaaaatcagggaaaatctcaagattgcaacccctgcacctaaagtgatgttattttaaaggaaaaagtagattttacgaaaattcacactcctacaccattatgaccactattcagtaacacaacaacattcttcaaattctgtaacgggacacggctactctgtgtcactatagtgcactattaataaccaattatgcccatgttttctcccaaaaaactacttcgagtctgaaactatttcacacaaacagttcaatagaaagaaaataaaaataaactcaaattgagaaaccaaagctctaatgtgagtggaaatcatgcctttgacggtgattcactagagctggcagcaacggtatgattccctgattgagatgtaagtgcctgtacgtcttgtgaaattctgtagggagaggaacatgcttgggaacaccccaacgatcccactctgcactccaaaatatacattgaacttatgttaacaaattttctaataattaatgcaaatacattccaaggtatgcatttaacaattgtctttctttccataaatatttgtatgaatgcagaatgcaagacaaataaggactgtttgttgtgatcaagtgaggattttttgttttcacttttactaaaaaaatgttactgtttcctattctaaaaaaattgaatgagtgaaaacatgttgtcaaaaaagattccaaaaaggttacaatttattattcaaaaacagaggatctagtgaaaacaatgttgtcattggatctttctggtaacaagtttagtgaagaactgacagtgatattcaataacttgtctgggtgttttggatactcattgcaagaactgaatctaggttggaataaaatccacggcatactgcctgaattctcaatgtttttgaagttggaaacattggttctatcagggaatcaattaaagggtggagttccataatcacttcaaaatgcaagttatttgcaatgctatccaatatcagtttgagtggaaatcttccactgataatcaataacttatctagatatattggatactcactggaagaattagatttgggcatgaatcaaatggcactcttccaaactctctctcagtgttcccatctttaagaagattgtagctttataggaacaagctaaatgggacaatttctgaagaggttggatttccagctcgcctagaacaactagatttgagttcaaacgctttgaacggtgtcatcactgacttgtatttggctaatatgtctacgttaaagtcattgatttatatgataactcattggctctggaaattagccaaaaccgggcccatgttttccattgagttagataggattgagatcttgcaagttaggtcagacatttcccaaatgactttagctatattgacatttcaaaaactggagtatcagattttgttccaaagtggttctggctaaatgagctgtggaaaagtggatggaaatagatctttggtataattatctacagggtatgcttccaaattttccacaaaagtatattcaatattccccaattcttgaatcaaatcaatttgatggccctattccaccacttttacgaggtttcatatttcttgatttattcaataacaaaagatgaacatctaagtataaaaaaatgaacaagaataattttattgcatttctgaaatatagattaaattgtttacaaaatattaatttctaattaatagtcaatgatgataggatgcttgaaaataatatatatattcaaggaaagatctccaatctaaatcttactattttcttatctcaaaatgtcttttaaaactacaaatcatttatgattatgttaataacgtaagattatcattttttgataagttatttgtttaaaaagtatataatgtgttgaaagagttttactattattaacttcaattactagagttttaaaatgacatccattaatattaatatatttaattttatatcatttcgtattagttaaataaatgtaataaacaatgatggtaataaaacttaagtagtggagtaggctataaaatttttacttattttctgatcgcaaaaactacatatgaataatgtttatttttcttcattttttatatatcatttttctccttggaagttatttagtgtcaaattgagcataagtttgaggggggtagtttttctccttgggatttcatatttttttttattctcttgttgtatctatttgaggaaaacttttgaaggatatcttaatttttggcagaaaaattctggattataggtgccagcttgttgatgtgaaaaaatgcaaagagccacttttgaaggtgagaaggcatctctcacagttggatttggagagagaataaaggaaggcttttctagatttattattttctttaaaagtggatgactaagggatcctatgtcttatgtattttgagttaataatgggttgctaattttctttgggctagggcttgagggagccaattggaattgtgatctagttatttttttttctaagcattttgttgatagattgtccttcaaatcttaatttactgttttgtatgaagttgatgaatcttcataatattgggaaatgatttgtttgcttattggttcttgatttttgaccatgctctttgattatgtagaaattagaaacaattggtgtttgagctacgaatttcgttgtgcttttttaccttagtcgtatgatttcattttaaggaattaagttgtatgatattgaaaaggttcattgtcaaggaattgaacttgaactactttagccaaaaatgatcttaggcttgagcacagtcgtttggattaggtgaaagttaggtcgttacttaaaatcccaaaaatcaaaacataaccctctttcatcatttgcaaaagactttaaatcagttgactaaatttctaggtaattcattttaatttctttttaatatctaacttcattacaaatttaaattcagagtttctttcaattccaatagcattcaactagttccatttaaagaaaattcatttcagttgcacaactgtataagcagtacagtttaaagacaattcaatttacaaaattctactgtcatatataatacagcacacctaaaatgttgtgtgtaaaatattcctacttcctacaaagccattgcatcttccaaaaccatgcatgacataacatgaatcccctaatacaggttctcatttgtttgtagacaactcaaacgaaaaccgagaacccattcctaaacatagtgcataatgatctacacgtcctttagagaatagatgcatgttgcagaacttgtgcttttctggcatgggaatcatgatatctctgtgacatctgggatatagtgagacatttaggcatgctttgagttcaacatctctggtgaaggactccttcctttgttgaaatgtatcattgaagacgaattgtcacaaatccaataataaaagtagcattccacaatctaaaggaagtgagtcagctgttgtttcttccttgaacctccttctccatacaaatcattccactgctttaactcattcattacggatgcttctgatgcaaaacttgcatccacttgcatttaatcagatatatgtaagttcatgtagatgggaaaagatattctattgcaaataacactttccttcttccactcgtgtgatatttagtatgaaatctttggttacaagttaccattttaagtggaaaaaaatggatcagatgaccctagtgccatatatctattaccgtattcaaccgaaccaacgttttttaatttctagattttaaaaatccacttttgactagttcgtgcagtattgtacaaatgcccaaatcaagtactccgtatacatttgaatgaaatttaaagttcaccctacctgactcttagcctgtctcatgtcttccatgtttaaagacctcgctttaatttcttgttcttccttgtctttattgtttgaagcatcttcggagctctggccttcttcttctctttgcttcttttcctaaaatatgatgcaacatatatttagttagatcttcagctcataccaaaatttgcatggatggagatgtcaaacttaaaagagtagaagaagttgtttaatagctaccatgtctttcattctcttcctcatggcctcatgctctcctattctagtcctctgtccaatcatactataaaccttagcaggcagtgtgaacagagctcgaatgttcttttcatcctctccaaaccattttgatgtgaatgatggttgacattgagacattaatgaaacttgaacactagcttcattagcaattgcctttgctagcatttttttccagtaccaggaggcccaaaaagcaatatagctctgtttgaatttgggtgtgctgatttattgatcaccatttatatgctcagaatcaactatgtttaagtagacaagaagcatagaaaagtgcaaacgacaattgttccatcatctaaaagagggtgacgctctaatctcaaatatagtgctatgtttaaccagaaaactaatatgaatgataacaaatcaacaataagtgttacgtgcacactaggtaacatttgtataacaacataagccatcttttgattacaaaaattacacattaaagtatgatatcagattcagaaaaacaccacgtatttatcaggaaagatgcatcattcatctcctgcagctgccctgtttccaacgcaacagatactgatactaaaaaatgcaacaatctatttataatatataatttctgagatgtgcaacaataggcttacgcatcattactacattttttcgcctcatgcttaattagtaagaatcattagaagctaaaaataaatttaaatgaatttcataccctgctgcacgcaatagttcaatgtagaattaagccttgaaatagtaccccctactaagtgttcgaatttgttgctgtcataactgatgatgttgaaacctgatttggcttcagacatgagaaagaagcttgatggttttaccatattcatcaatggggaaactgaggatatgaaggaagcaaacatggggaaaagggacctgtaatctttagaatcagagctaaagtatgattttcgaaagagtttggcatgacatagtgcctttttcacaagctctggtataattcatattcctacggaaatgtaatcaattgattttcattcagtttttgcattcataattaaatttatccttaggaattctagacgtagaggagttgttcaacacttcagattcatggcacagtgagaatggtttttcttttttattttctcgctaaattgtttttctatataaaaaattgggtatttagctacttccccaatactttttcttattttctctctcatttgtttggttattatttgtttttttctggcatgtcattacattacagtggctatatcattttacaaactataagcacgtcaaccatataagtgtttgtctttgctaaacccccaatgaccggtgttgtaaagtcattagagagaccaacataccctgttgtaaagtcattagagagtttggcatggcatagttcctcaatactttttctttgatttctcttattttctatgatttcataatttaaaatcacattttactacttccttatttcttattagctatgacttcatcacttattttggctcaacagttctacagaggagaccttttgttgaacaaaattattacagtttgcaccagggaaccatgatataatcacccccttttatgatctaggatgcatggttggcttacttgcagatcattttgcccttttatgagacatgtgaaggattggggcttttaatttattttttcaggttctaggtgcgttcataaaatacaacttatgaaggatcggggttagtacatactctatagcattagagtagaagctgagtacaaggaacacttttaatgtaaaggactaactcctgtatgtaggcttttttttgctggttcttatctgttgtatgataccccttgtaccccacttgaataaaatttattagtcctctataagaaaatattataatactctgaacggttagagtaaatgagacaccacatgattggtgtcattcgtagttttcataccattcagcattttccaatatttatttgcatgttaatattttcacattgagtgatatgtttcaatataaggtggatgcatggtaaagctagttctttaagagatttgcaaacaaggaatgggtcaaagcttttgaaaagaattaatgtatctctagactctctggttagtcatcatcacgacccaactcctccaacctagcacttttcaaacccggggaaagatccttgtaagcagaaaggctcataactaccttctttttgaagaagtatactatcatctcctgatgaatttaagaaatatcagttatccactctccactgctattctgaattttatggataaagttcagttgccttctattcccaaatttcatccatctgcaatggaacttctaaaaccagagaaactcttcttggaacagagtattatgtaattcttcccagagctcagcttgaagaaaaaataaaataaaaaagagtctgtgaattaaaatttaaataaaatatgttcctagtataaaatagtattttatattatcattaaatcataatttaacatgtatcttagaattgttgacttatatagtacattacatatatattatgacattgtatattttacaatgttcagagcatgggaagagtgtgaatagtggctgtcaaacatcacttccaaccttgttgagctggatcttggaggttttcacatcatcaaatcattttggcatggtcttgaattctcttgagcaccttgagctctcctttaatagattcaagggtgaggttttcaagtccttcataaatgtatgcaccctacattctttatacatgtcttttaacaatttgactgaagaccttcgatagaaatagagaataatgggttgtcacttttaaaaagtattgatctctcaagtccttcatgaacgtacgcaaacagcttgtttactttcgtattcacaattcaaagtcgtcttttgtttatttatttatttatttttgaatcagagaactttttgaagtcgtcgatcatgtttttcatattttgtcagtcttgtaacttttgaaaactttttttttatagaccaataatataatatattatattaaaaaaaccaaacttataacaacatgtaacacgttggaaaacagtagatctcaaccaaacgttcgaaaacttttggatattatatatgtggctattgacagtgctaaactcagcagtatatctccattattgatgagtctcccctaaaatgtcactagtctgcacttcatatatatcgtctagaatgctacattattttctaagtcttgtttttttatttaattggttagatattaaataacttatactatatacatataagtgctcaaactaaaaagaaaatgctcatttcaaatattcagacatcttaaacattcaactataaaatgagtgtttgaatttgatagccccttcaagcatggtatacatttttgtgtttaaatttgatagccccttcaagtagggtatacatttttaaacccaattttttcttcttaattaagaacatggtcactttttttagccaaattcaatttgaatgtcacttaaagcacaacaccattttaatgtcaataacatataatttgaagtcctccacttgtttaggatggtttgaaaggaaataaattgggaagaaatgaatggaaataaaatagaaacttttggttttgattggatgaaaatgaaataaaataaatttagtggagtccaaaaaaatgattcctaaaaaacagtggtaaaatgaaaggattttgtgtgaagcaatgctaatcttatgggaggattggtaaaaaaaaatcattcagttttttattatttctatttattcaaataatataaatttttcacctagtttctcttttatctctctcttttttttttcgttcttccatttttctctctttcacctctaatccaaacaaactgtaaaagttacggatgagttatattttcactttttttttcaaactgcagttttttgttttcataaattgcaaattttgtgctaattatttttctaattattttaaatatgaatgtcattaccttaattacgaagaaatactataaacttttttgtaatttcttgaccgaagactttttcgagtctctcttaaaatgttactagtctgcacctgatatatatagtttagaatactacattatattctaagtcttatttttttatataattagttagatattaaattgaaaaataagagaaaagttgtgttgttgtataattttcgtcacttttactcataagaaaatatatatactacgtttagcatctttaaactaaaaattgttcagttgaaatgcataacaaaatatggatcaagtaattagtgcacaaaatcttgctcaaagtgtttatcactatagattgaggttgtgcttaggatgattacttaatatcgttaattgatagttgactttagtggtatcccttctcatagcgtgcgtgtgtaaatgttttttttttataactaatttcataaattttattgaatatattttttttatatttgattcgtatattacaacatttaaaaaattaaatatcctaaaaatgatttttgttgcctaatttataagataaattgatttaattagggtcatgacaaaattttgccagattctattttagtctgccttgctttagaatgtttacattcaaataactcttttataacagaacaacaaataaaaaaagctatttattgattatacatacaaaaggattaattatgcttttctttggggcaattttttttatgaatgccaattttaaataattattcaggtattcaagaagacgtacgcaaacagcttgtttacctttcgtattcacaattcaaagtcgtcttttgtttatttatttatttttgaatcagagaactttttgaagtcgtcgatcatgtttttcatattttgtcagtcttgtaacttttgaaaactttttttcttttttttatagaccaataatataatatattatattaaaaaaaccaaacttataacaacatgtaacacgttagcaaacagtagatctcaaccaaacgttcgaaaacttttggatattatatatgtggctgttggcactgctaaactcagcagtatatctccattattgatgagtctctcctaaaattatctttccaagtcttattttttatttaattggttagatattaaattgaaaaataaaataaaagttgtgttgttgtgtagttttcgtcacttttactcataagaaaatatatatactacgtttagcatctttaaactgaaaacttttcagttgaaatgcataacaaaatattggccaagtaattagtacacaaaatcttgctcaaagtgtttgccaccatagatttaggttgtgtttaggacgattacttaaaatatcattaattgataattgaaacttcaaataaaatttaaaagtttaaaagttgaatagttaaaaatgaaagctgaaaataaataagctaatggattcaatttgaagtatttaatagtatcaactagtgaaatttattcataaattctcttttaaatatataccgattttattagttaatataaaaaaaaaatagtatgaactaataaaattgatcaaaagtaaattaatataaatataaaattttatatgatgaataatcagtagaaataataaaaaagttagctctagaaaagataaattgatttaattagggtcatgacaaaattttgctagcttctattttagtctgctttgctttagaatatttacattcaaatagctcttttatagcataacaaacataaaaaaagctattgattctacataaaaaaaaaagattaattatgctattctttgggacaaaacttttagatgaatgccaatttaaaataattattaaggtattcaagcagacgtacgcaagtagctttgttactttcgtattgacaattcaaaatcgtcttttatttttattttgttttgtttaattagaggactttttgaagtcgtccatcatgtgtttcttattttgtcagttttgtcacttatgaacactttttttacagacaaataatatattatattaaaaaaaccatacttataacaacaacatgtaacacgttggcaaacagttaatctcaaccaaacgctcgaaaacttttggatattatatatatatatgcatggctattggcagtgctaaagtcatcattatcattctaaagtcatcagtatcattctaattctcatattgagtggattcatttcatcaatcactttgcctttctcatcataaccaccaaaatgccaaccattaatccagttggtttgaaattcatggaaggcataataacatttatgatgatgatgttgcaggttgttgtttctgctcaagaccatattatgtgcattcagactgagagagaagcactcctccaattcaaggctgcacttctggatcactatggcatgctctcttcttggaccacttctgattgctgccaatggcaagggattcgctgctccaacctcaccgcccatgttctaatgctcgaccttcacagtttaggcctcagaggagagatccaccagtcgttgatggagttgcaacaattaaactatttaaacctcagttggaattcttttcaaggcagaggaatcccagagtttcttggttctctcaccaacttgagataccttgatctgtcacattctgattttgaaggaaaaattccaactcagtttggctctctttctcatttgaaatacttaaatcttgctgggaattattatctggagggttcaatcccacgtcaacttggaaatctctcccagttgcagcatcttgatctcagggccaatcaatttgaaggaaatataccctctcaaattggaaatctctcccagttgcagcatcttgatctcagctacaattcttttgaaggaagtataccgtcccaacttgggaacctttcaaatttgcagaagctttatcttggaggatcatattatgacgatgatggtgctctcaaaattgacgatggagatcattggctgtctaatctcatttccttaacccatctttccttcgactccatatctaatctcaacacttctcatagcttcctccaaatgattgccaagctaccaaaacttagagaactgagtttaattcattgtagcctttccgatcattttatcctttcactgaggccctccaaattcaatttttctagttctctttccagacttgatctttcctggaacagcttcacgtcatcaatgatactccagtggctgtccaacgtcacttccaaccttgttgagcttgaccttagtaataacctcttggagggttccacatcaaaccattttggccgtgtaatgaattctcttgagcacctcgacctctcatataatatattcaagggtgaggatttgaaatccttggcgaatatatgcaccttacattctttatacatgccagcaaaccatttgactgaagaccttccatcaatccttcataatttgtctagtggttgtgttagacactcattacaagatttggttttgtcatttaatcaaatcactggctctttacctgacctttcagtattctcatctctaaaaatattggttctcgatatgaatcaattaagtggaaacatacctgaaggaatccgcttaccaattcatttggaatctctgtcaatccaatcaaacactttagaaggtggaattccaaaatcatttgggaatgcatgtgctttgcgctcactgtatatgtctggtaacaatttgaataaagagctttcggtgataatccatcaattgtctgggtgtgccagattctcgctgcaagaattgaacttaagaggaaatcaaatcaatggtacgcttcctgacctttcaatattttctgccttaaaaacattggatctttcagaaaatcaattaaatgacaaaattccagagagtaccaaattgccatctctgttggagtctttgtcaatcacttcaaacattttagaaggtggaattccaaaatcatttgggaatgcatgtgctttgcgctcattggacatgtctaataatagcttgagtgaagagtttccaatgataatccatcacttgtctggatgtgctagatattcattggaacaattatatctaggcatgaatcaaatcaatgacacactacccgacctctcaatattctcatctttaagagaattatatctttatgggaacaagctaaatggagagatttcaaaagatattaaatttccacctcaactggaggtactatatatgcaatcaaattccttaaagggtgtgctcactgattatcatttcgctaatatgtctaagttagacatcttggacttatctgagaactctttattggccttggcatttagccaaaattgggttccaccatttcagttgagccacataggattgcgatcttgcaagctaggtcgagtatttcccaaatggctgaatacacaaaatcaaattgagtatattgacatatcaaataatcatttctctggaaaaattccggattgttggagtcatttcaagtcattatcttatttggacttaagtcacaataatttttcaggaaggatacctacatccatgggatctcttgttgatcttcgagcattgctattgagaaacaacaacttatcaaatgagatacctttctccttgaggagttgcacaaatctggtagtgctagatattgcagaaaataggttatcaggatctatccctgattggattgggagcgaattacaagagttaaaatttttaagtttgagaagaaatcatttccatggaagtttaccattgaaaatttgctacctaagtaacattcaactcttggatctctcactaaacaacatgtctgggcaaattcctaaatgcataaaaatttttacttcaatgactcaaaagacatctgcaacaatatttttcattgaactacgtgattttaatgtacacttgatgtggaaaggttcagaacaaatgttcaaaaagaatgtgttatcacttttaaaaggcattgatctttcaagcaatcacttttctggagaaattccaatagaaatagagagtttatttgaattggtttcattaaatttatcaagaaacaatttgactggaaaaattccttcaaatattgggaagttaacatcacttgactttcttgatttgtcaagaaaccagctagttggttcaattccttcaagtcttactcaaattgatcgactctctatgttagatttgtcacataacaatctatctggagaaattccaactggtacacaattacagagtttcaatgcctcatgttatgaagataatctatatctttgtggaccgccactgaagaaattgtgtatcgatgggaagcctgcacaggagccaattgttaaacttcttgaagatgaaaaattgctttttgcccgtgaattttacattagtatggcaattggatttgttacaagcttctggggagtctttggctcaatattaataaagcgttcttggagacatgtttatttcaagttcttgaacaatctatcagacaatatttatgtcaaggtagcagtatttgctaataaaatatcaaaggtgcatggatgaagcttaacaggtaataatattgtagtcctttcttttgcttttcatatagtttatatacatgaaagatttcatacataatataattttgaagtgtgacaataagatttcattgaactatttttaatataattaattttgaagagataccggagaatttatttatattgtcatccaatcatttataactttgtatatgataagtttgtggaattttacaaaaattatattaagattaattaatggtataaaattgtattatcgttgcataatcattaaactcataattattgatgttcaatacttaatcctaaaatattaacgatctccattattaccataaactatcctataaaattatactattgttgcataatcattaaactcataattattgatgtttaatacttaatcctaaaatattaatgatctccattattaccataaatatttttcttataaactattgtgattttaatctatcattaacttgatgttattattctgattactttaatttctccaaatttctttttataggtataagaattttatttgttttcatttgcacattttgatatctaacattctgtttcccttttctttctttctttttttttttttttttagaaaattcaatcccttgaagacactggccctcttggatgactccaatgtctaagcttgttaaggcttggaaaaggcaataagttggaaattatgattgttttacatttcttcactagcaattgagatacttatatcatgttttgatcatttcaagaagactctagttttattagcgttgtgctagtaatgaaatataaattactatgtattatatcattaatttacgtgcatctttgtcataatcaaaatttcagtttgtcaaagacattgttgagttgaatattttgataagggccttattttcaattttttaagaatcaaagatattagaaaattgaaggcacatattttgaatgaataaatctatcatcataattttgtcataattagaacaaaataatttgatcacatatgtttaaactatatggagatcactccaatttccaaactgtgcatgccttttattttaagaaataataataataatctatattattaattattaatctatattaataataaaggaaatatctccattggatatctacatttcattagataattttatctttaaatcatttcttaaattttgaaaattttcttctaacctattgcaactttccactacttctatattgttaatcttttttactctatcatttttttattaaatgtatttaaattttgtttttttaattgttggatttgttatttaaaatttggagaggccccatctactccttttcagctccacaaattttagacaactatatattttatcaatttttaaacttctactactctttcctaataactatccatcattctcatgttgttagttattttattttaacttctaaatcttttccttttctttatttttatttttatttaaaatatgtaaacagattgggagtgtctctctcccctaattataataataataaatttaaacttttgagtgaaatgatcaacaaaaatggtatatgcataaggattctcttatcttacaaataaatggatcatgtatatcaagagacttcccggagaatgtttgaaccaaaatatggtttgcatagacaaccgtctcctgaaaatacatgataaaagtagatgccataatgcacattgtaaacccacccacacatggtggagatggaacaagatattgtataaaatatccaattagataaacttaattcttcatggtcatcaatttcaaatatgcagacaacttaaacattcaaatataaaatgagtgttgcacatgaaaagtagagcaagttgaaggttctgagctcagtacaaaaacaaattagagttcagagtagagaaaaatattgccaaagatgagttagtgtgaatcaaatagtataagcatcgcatatgttaggaagaagccattgcagccaagaaagcatagtaaatagttagttaaatctgttgggttagttaccaacaagttgttaataccattagtttgtttagttagttatgcatataaataattgtagtatgtaagagttgcatgaatgaataaaaggcatgtagaaaagcttagaatcggtttaagactttcttaggaggagccttgcctcgaacaaaggcactaccccaccttctgtctctatcaattggtccgacctgtcgtcgctgtcgtatcgccatggctgaccacacaaccagaaagaccacgatggaaagacttgaagacgcagttgctcgcctatccaacagccaagcttccctcaatgacaaatacgcagaactttctggcaaggtggactcgattctcgatcacctccacctgcggtcacccaaccataatcatctcaattccaacactcacctccatcaacgtaatgtagccaaattagatatcctgcgattctcgatcacccacctgccgcccatgactgcctccacctctactcccggccatgccataacacaccacccacaaccacccctgcaggagccatcccttccttctctttctgtacatccagctcaatccattgggattgattttgcaagtactcggcaccgtctgttaagcttgtttagtaccacagctctgcaaaccatgccaccttccatggattccacagtgccaacggcactgctggaacatcaccacacaatggatccgaacacctcaccatggtgccccgacacaatcaccgttccctggagagctcgcgtcactccccaaacgatgccgcaaagcttccacttacccaagatcacgccattcccaaacgacaacgttttgtccacagcacaaacactagaaaccccgccaacgcctctccccaaaccggaaaacaaaaatctaaaagttttccttcaaatccgacccctccttttgtcgcccgttcaagctccgtgcaagagacctaagagcgcgtggcctcagaaccccgtcaaaaacaacgcgccaccaggtgctgaatttccaagaacaagaatcccaccgcgtgcttaatggttaacgacccacagtcgatgacgctatcaactcctgtaagctcgatagatccgaagcgaatcaaatcagaaacttatggaggcttctcacgtgttttctcttccgactcatctgagtttcaagtgtacgagagaatgatgaaacctctggtggaggagtttcttagaggtagaagtggaatgttggctgccattgctaatggactccacaaaaagaccattagctttggtgcaaagaatgctctcattttttatcccggtgggacttttgctgcgaatttccctatttccatttttttcattacccaacaccatgagaacaaggtgtttttgatggggtagggaatgttaagaagaagctattgcagccaagaaaacatagtaaatagttagttaaatctgttgggttagttaccaactagttgttaataccattagtttgtttaattagttatacatgtaaataattgcagtatgtaagagttgcatgaatgaataaaaggcatgcagaaaagtttagaatcagtttcagactttcttaggaggagccttgccttgaacaaaggcactaccccaccctctgtctctatcagcataatagatagaagcatgaaaaaccatatctattttgggcacctaaaacgatgttattttaagggcaaaagtagattttacaaaaattcacactctgacaccattatgaccacaattcaataacacaacaacattcaaattctgtaactggacacagctactctgcatcactatagtgcactattaataaccaagttaaaaacattttgatgcaatctaaatatggccctttcatcagtctaacaatgaaacttagtgatttaaaaaaaaaaacaatggaactaagtattattttttgctccttttcatcagtcaaaatataacccaaagaaaatgttgaagttacatagcctgaggatagaatgaaggatttctaacaaactcctgacatgagtcgttctgatcatcttaaagtgttaagagtggggagatgtctgaacaagtataattgtgaaaagctaatattctgaccactaatttaatgttaagatagatgtatccctgacctaatcatagatgaaggtgcgtcattcagaaactaggagccagaactaatgagttaaattatataggatggagaaatttgaatagatcaaacagaaattctgaatattactaattatggacctgtgaactaagtcatttcatgcataatatgtgcttgtaaagtgaaacaataattcttaggagcccatgttttctcccacaaaaactgcttcgagtctgaaactatttcacgcaaacagttcaatagaaagaaaataaaaatatactcaaattgagaaaccaaagctctaatgtgagtggaaatcatgcctttgatggtgattcactagagctggcagcagcggtatgattccctgattgagatgtaagtgcctctagcgtcttgtgaaattctgtagggagaggaacatgcttgggaacaccccaacgatcccactctgcactccaaaatatacattgaacatatgttaacaaattttctaataattgatgcaaatacattccaaggtatgcatttaacaattgtctttcttttcataaatatttgtatgaatgcagaatgcaagacaaataaagggctgtatgttgtgagcaagtgaggattttttgttttcacttttactacaaaaatctatgaagcaccaatactgacatagacaccggacatgtggacacctgtaatgtccaaaatatagaacatggacacgactatatatatatatatatataaaataaaataaactaaaattacataaacttaaatatgaacgatatgcataaaagatctaaattgaaaatcaagatttacatattcatcatcatctcaagatttaaccatgtaacatcacaaatattgaattttatctcataattttcaccaccacctacactttttatctttgtaacataggtccataaaggtttggtatcatcatcttgttctttagcttgactaggactagaagcactcatctctacaacaattttaaaaaaataaaaatcaatgtaaacaagtgaaaaacaaacaaaaaacaatataccaaaagaaactagaaagggcaacgcatacgaaaaacaaacaaatagcaataacacttttgtatctccattctccacggaagaaaaaaaagagaaacagggagcagtccagcaaattagaaaagagaaacaagggcctacctgtgcggggaaacggtggcgacaacatgcagcaagggagacgtttggttcacttgcaggaaacaacaaggagaagatgaagaagaaggtgcatgagaatgagaatggttcgtatttggtaagcatttttttaataaataataaaaatagctaaggtgtccgcgtccacttgttgggttgcatccagtcgtgcatgtccggctgtccaaccgtgtccggtgacagtggaagtacccgacatcgcgtcgcaccagagtcgtgtccgcatttgtgtccgatgcaagtccgacgcgggacacgccgctgaagtgccgcgtccgtgcttcttagacaaaaatgttactgtgtcctattctaaaaaatttgaatgagtgaaaacgatgttgtcaaaaaagaaaaaggttacaatttattattcaaaaacagaggatctagttctgactgtgaatctaggttggaataaaatccacggcatactgcccgaattctcaatgtttttgaagttggaaacattggtatcagggaatcaattaaagggtggagttccaaaatcacttcaaaatgcaagttatttgcgctcactgatgctatccaatatcagtttgagtggagatcttccactgataatccataacttgtctagatatatgaaagtttaccattacaaatttgtcatctaaaaaacattcatatgttgaatttgtccctaacaggtttatgaattttttcttcacctatatggtgctcaacttttttatttctactcgatgtgtgacttaacctcacacttgtacttcaacagctagttggttcaatttcttccagtcttactcaaattgatggactctctgtgttagatttgtcacataacaatctatctggaaaactttcaactgatacacaattacagagtttcaatgcctcatgttatgaaaataatcttgatctttatggaccgccactagagaaattgtgtattgatggaaaccgccataggaaccaattgttaaacttcctggagctgaaaaattgcttttcacccatgaattttacacgagtatgacaattggatttgttataagcttctgggcgtctttagctcaatcttaataaagtgtacttggagacatgcttatttcaagttcataagcaatttaccatacgttatttaggtcatggcagcagtgaaagttttcaagtggcgtcatagaggatagctggtaataatatacttcatttttcctttatatgataaataagtcacaaaccttagtttacaattggatggcgtttttctcttttgttttgacctttaggccctcaattaataaaaaacaattattcatcaacacgaaccttagttgactatcacactgcaggtaaacaagttgtagtccggttttcttcttaaaagaagactagctaagccatatatcatatatctttgaatgaactagttttaactaaagatgaaccaacagttatatgataatgaaaaagaaaagttgaacgtgcatgcatgtttgttttgcatttccgaaagctagattagattgtttacaaaatgctaatgtaatttaatattcaataatgatacaatgtttgaaaatatatattaaatgagttgtacatatatattcgaacaatctaaatcttgatattttaaatattcttatctcaaaatatcttttaacatgactacaaatcattttttaggattctgttaatcccgtaatataatcaatttttgataaatgtttttctaaaaagcatataataagttgaaagagttcaattactaattagtattaacttcaatgtattggagttttacacgggcatctattaatattaatatatttaattctatttatattcataccatttcgtattagttaaataaattaaaggaatgatgattgttatgtaggttataaaacttcgttacactgacatttcatattaaacaaaattaaaatactttaacttattttctaatcgcaaaataataacgtatattttttcctgatatatctttttcctccttgtaagttattaagtgtaaaatagagaatacaagtttgaggtagtttttctatctcattttctacttctttatatagcttttaattagtcttggtaattttcttggcatttgaattttttctttattctttttttacttctaggtggcagcttgttgaggtagaaaatgcaaagagacgcttttggagagaaaattaaggaaggcctttagagcttgagggagcaattgtgattgtgatctagtttattttcctttttaatttctaagcattttgtttgtagtttagcctttaaatctgaactagttgttttgtatgaacgaagttgatgaatcttcataataatcggaattgagacgtttggttattgcttcttgatttttcggccatgctctttgatatgtagaaatagaaaactgtgtttgatctacggattttgttgtgcttttgtacattagtctcatgatttcattcaaggaattaagttatatgagattaaaaggattaattgtcaaggaattgaatgtgaattactgcagcaaaaactgatcttaaacttgggcaaagttctttggatcaggtggactaaatttcttgataattcattttaatatctattaatatctaactatattacaattttaaattcatagtgtctttcaattccaatagcattcaattagtttgatttagcaaaacaatatgtgtcaaatttactcctcgtgaaacatagttcatttaccattatattacttgttgagctcaatgcagttgggggaggctggtttcataacttcagtctcttcttttcatcatctctctttttactcgatctcttccaaagaaccaaactaactatagaaaacgaataagctgtttattttaaatacacaatttgagttcaaggcagaaacatttatgaaagtgtcattgtattaattttttattatattaaggagtacatattttggttaatatataagacgacaaatataaaattgatattaaacatttatcatacgaatattgaattaagaaattttgatatttaatatattgatgtataggaataatgaaattataaccaattaagaattttaaaatttatagaaagtattgggttttggtgtgaattgaattggaattattttaatttattgaatattttagttatttttctcaatattctcttcttcttttttttaaagtatatatattcttcttcttccttaagaacatggtcactttaataaataaaaaaatcatttatgggtctattgtcatatatctaggacaaatagattaattaactttaaatttaaatgtcctcttcaagcatgatatatgtttttaaacccaatttcctcttcttcattaagaacatggtcacttttttcaactaaacccaatttgaatgccacttcaagcacggtatgattttaatgtcaattgcatataatttgaagtcctccattgggatcatttggaaggaaataaattgggaagaagtgaaagaaaataaaatgggaactttggatttggatgggatggaaatgaaaatgaagtaaaacaaatttagtggggtccaaaaaaaaattgattcctcaaaaacagtggtgaaatgggagaattttgtgtgaagcaatattaattttatgggaggattcctaaaaaagccactcattttttattatttttatttatccaaacaaaataaattctccacctcattcctcttttatttctctttttttcactttcattttctctatttcatctctaatccaaacaaaccgcaaaagttacggatgagtaatctttttttaaaaaaaattcatagtgcagtttttttttataaattacaaattttgtgcttattaattttctaattatcaactttttttaacttcttgattgaagacttttccaagtctcccctaaaatgtcactagtctccccttgatatatatagtttagaatgctacattattattatttaattggttagatattaaattgaaaaataaaagcaaaatgggaacctaagcagcaattgtgccattgttgtgtagttatcgtcacttttactcataagagaatatatatatatatatatatatatatatatatatatatatatatatatatatgaagtgcattttagcatatttaaactaaaaaattttcaatcgaaatgcataataaaatattggtaaattaattagtacacaaaattttgcttatagtatttgtcaccatagatttaggttgtgtttaggacgattacttaaaatattattaattgatagttgaaattttagatgaaattaaaaagtttgaaagttgaaaagttaaaaactgaaattaagctgaaaatacataagccaatggattcaattatatttgaagtattcataatattatctactaaattaaatttgctcctaacttttcttttaaatatataccaattttattggttaatgtttgtaaaaaataatattagctaggaacaaaatttatttttaaattaaaataaatattcaatggcatttggatgaaagttttggttcaaaaatttcccttaaaatcattatttttctgaagaagttgtggtagaagcaaacagaaccacagaagtcataattattatttagacgtcttgtagtaccaatacgaggtccgattggaaattagctgtatgccgaacccatcttatagcggccatgtttatatgcttcaaatctttttagcaaattaaataccaagttttttttttaatacaattctccccttcttctcctttatttttattttatctattggaatcaaacataatatcaaagaatttatattagttcacacattttgtccaactaaccgagttaaaaccctagactatccaaatcactttaaacttttaaatggcaaaataaaagttatacacaaatttatattccagcatttttaccaatattcatagttttagttacttgtttctatttttaaaacgtcctaatacttacttcttttgcttttatatttatgacataaatatatagaatataacatgtttaatataaataatataaaaggagctgataaaaaattaaaaaaagcgggaaagaaataattataaaatcaacataaccaatcaaactatttgggtcaaaagaaattatttgaatatattttacatactttcgtaaaatttatattattaaatttagaggaaatacaaaattattttaactaatttccataaattttattgaagagttatttttatattttatccgtgtattacaaaatttttaaaattaaatatcctaaaatgattttttattaaaagtatgcacatctaaaacttttttttactgttatttactaaaagtaaaaaataaatatgtttttatgtaactagtttaaatataaaaatgaatgtaaaaaataatacaaaataataagacaaataaatataaatgcaattaacacagaaataaatttaatatataacaaaatttgatcaaaagtaaattaatataaatataatatttaaatgatgaataatcagtagaaatgataaaaaaaagttagatatagaaaagataaattgatttagggtcatgaaaaaatcttgctagcttctattttagaaatggtaaaatatttcatattaaaagctatgaaaatgatataaaaaaataactaattttgtgcttattgtttttcaaaatcttcatcaagtatttattgagtttctcgtaacttgtactagataggtcaatgtatgactagtcaatgcttaatgtaccaatatttatgcttatattcaaatcatagaacaaattattattacgtatatcaagttctttaaaatctacatcaaatattcattgagtttctcataacttgtattagacagatcactgtataactagtcaatgctcagtgtactaatatttatacttgtattcaattcattgatcaaattactactaactatatttagttctttaaaatctgcatcagatttttattaagtttctcgtaacttgttgtgaacaggttagtgtatgactagttaatactcagtataccaatatttatgtttatattcaattcaatgaccaaattactactcaatatattgaacacttcaaaatctttgtcaaatatttgttgagtatctggtattctgaaacacataggtcaatgtttgactaaaatagttgagtgcatcaaaatttgtgcttataacaatttacatattaaatttgagctaagtattaatgacctgctccttgacaattccataaagtatttaattgagttgtcaaaactagtttaaaaggttttgtggttgctttgtaaaacattgtgacatacacttgaaaatgtagatagagttagtgtggcaagatcttgaaaaatagtgtgaatctaagattagagtgctagccacattaaggaaatggatcctctatattttcttttattttctatttcctccatttctttcattcttataagctttggggaatataaatcaaatgaagatgatatgtattttatggggagtaacatttatattttcaaaagcttaacaatgaaagaaatggataaaaaagaaatatagatgatccaaacacctacattaagaattgtatgtgtttgtttattcatgtccttatatttttttattggaatttattatttttcttgaatctactcctttctattaaaaggataatataagttaaggatcttcttctatttatactctgttttatcttttagtcaaagttgtgacaacattaactaacaagtaagacatatatatatatattcttaattttttttcccttaatttactacggaacttgttatgagtaataatttctccattatttgatttaataattattcatgatagtgacattttgcttatgctctaacaccattttgattttatttttcaaatgaattgctttattttttttttatctataagaatcaaagataggtaggtaacaagagatttataataattcatgcaccttacttaatgaactaagctagactatctcaataactaccttgatttcaatattttcttcatgcttaaggttttgtcattaaaaaatagccacaataattatctatgcttacacataattctttttcttttttttttcatcacacacaatgatgatgatgttggtggtgtggtggtggcgataatggaggtggtattggtggtgatgacggtggttataattatcaaactcttgagttaactcgttaatttttacaagtctatgaaactctcataagtttagtaaactctcgagtttgataattttggtggtgacaatgtatgttttttgaaccaaaaataaaattcataatttttttttgttttaaaaataagtaaaaatgttttaaaaatgatttaaaaatcattttagctttatttttctcaaacatattttgtttttgaaaattacatttaaaaatgaaaaccaaaatcaaaaactcacaatcaccctaaatggaccctaaagttgtgagagtaatataaaaaggttctttaacatacctcaagtataaaaaaggttgattaaacatgaacaagaagataattgtctaattattttccatagaattatttaaccttatttcttacttgagattttcaatatcaaatttaatatacacacatataaatttaaatatatttacaaaaagtatatataatttaaaactagaactatatttatatttatagaaaaaatgagactattactattagcaagaggggattgataatttttgcaacaaaagagttgatctgtttgaagagcctacacagggtttgaaaatagatctattttaaatcggttaatcccttgagaacaacatttgacattgcacccatgctgggtatcaaaacatcgtcatcgttttcagatagtaatagtgtgggccgttgtgttcatcgtcgacgattgttgccttgttttccagcttgcttttctctacttgctttctcgtggcattacgtttgcaactcctacatttgtaatggtttctatgaagtaacgatgcttagactcttggtcacaaatcaattcagtaccgatatgatttcttgtgatgacgagagtgtttcaaagcgtaacgttgtggatatcatattgccaaggtgaagagagaatttgcatatgtatgtgtctagttatttatttaccttggacatggagagcctttgattgggttttctccatatttttgccatgcccacaagttcatgactaagaggttgtttgggttacatgacatatttttcttctcttggcttttttatagaaaataaataaatttggtgtaaaatgtattgttttatgtacgggaaaaagtttgagttttcacgtttttgtttttatgtaatgatgcttacacacctaactatcattttgcaacatcatattttagttttaaattaaactaatcttatttccaaccccttttttattcaaacttaatcaatagtagtagttgtaaagttactaattatttcacatcaatgttgttatgattatataaaaaaaaaaacttaattggttgttttgaaaagatattaattaacgtggaatagtcaagtgtttttaacatatgctggaatgcttcataattgatgtagtgcgtccatgtgagaggatgcagtgtcgtttgtctttcttaagctcaagtactagtagatcacagcatgaatcatttgaaagcttcccagcttgttttataaccatataaaactgcttctttatgcacatgcttccatcttagtttggcatgatagtctttatgcattatctggattgatcaaatgtattttttataatacaaaatattgcgtgaatgaaaatatcttataaaaaatcctttaatagttttcgtttaaagtatataagaaacagacgccaataaccaaccagcacagttgaattcaattgccaaaacatgactttgtaagaccacttcaaactccaacgccagatcactcctagatcagattccccttttaaattagtttgacaatttgaccacattacaaaagttttagatttaaacaacatgcatcacccattttacatcatactacaatgaccattaaacaaccacaccttcgtgtatcactcagccccaattaattacttgcccaaaacaatactaaatccatgaatatagatgtttcttttcccacattaaatggcgacattaatttaattatttgctcaataattgaaataatgaaaacacacaataaatatagttgacctgctcatcctcctaagaataaaaaatgtcaactactagtagggtaagagacaaattaaatactacataaaacaaaaataaacaataaaataaaatcagagtttctatctcgtgataaaggcatcacagccggagacgggaagattctgaaactttctttccatttggtccacgtccacatgacacaccccacttgtgtattccaaaatttgagatttcatatacattttcaaaagttttttttataaaataattcttacattttcttctaagcatgacttttttttttctctattaaaaatataaatatagtaataaattaattattttatttatcagtgtcacttataagaaaatatactataaataaaatttacagcccctcaaactttatattgcatggctaataaatttggtacttttggcattgtacttggtgccatgtcgataatgatttttttgagaaacgctattttagtatcgaacgacataccataatagaaatgaattcctactatcaaatatatatgatagatacttaaaaatttattaaataattaatgtaataaagattgcatttaatttaatttaatttctatgcactatcaactattagaatattaagataaatatatttttagataattattataaaattgaataaatttattatatatgataatttatatttaaaaaaatatcattatctcattaatataaggttggggtctaataataaaaatagaatataaacattaatatttatacatactgtaattagaaactaaaactataattatatctataaaagaaaaatagaacttacaaattacaatcatcatgaaggtcggcgagttttgtgcggcgaagagctgaagaatctaaaccgggttggaaatcgggtcgggttccggataagactgtcccgacccggaagtgtttttctgacgtcgaaacgccgtcgcgttcaacattggtcaagcccaagagaacagcgtcggacatggcacccgtgttaggtatcaaaacgtcgtcgttatcagagggctcaatttccatgtcagggcaatcgggttcgctggccgagaccgtttcctcgttttccagcgtgtcagaaactgacaacattggagaaagctcggaatttgaagaacatgcgttttctttttttgggcaagacacggattcattgggttcggataaacgggtcgtggatggcttggttctggtgcttcccgcgagggagttccggtgaacaggtttcgcgtgtttgtggtcgccggtgtaggtcacgatgaacgtgttgggttcggtggtgcttcgttctacttgctttctcgcgacgcagcctttgcagctactgcatctgtaatagttcctatagaataacagttcaaagtaatgttgtggatttagtatgctgaatgaatttctcgtgatgagagtgaaattcaaaagtgtaatgttatggatatgttactgtgaaggtgatgagactatgagagaatgttttgcatatatatgtgtgtgtgtgtttggtttatttatttaccttggatatggagagcctttgatgggtttttgtccatattttcgccatgcccacaagtctgatgacaggttgtctgcggttacatggcacaccattttcttctgttggctttttctgtagaaaaaaatggaaattgatgtaaaatgtagtgattttatgttttggggttttatgtatcggaaaaagttcgagttttttttttttttttgttaatgtaatgagttgattaaagtgtgtttgtaaatgggaattgaagtgattatttacctttttcttgatctgggtgtttgcggttgtgtggttggtgaaaggatgggacttgtttggggtgcttgagggggtggttggttttgttctgggctttggagttgctgttgttggtggtgttggaatcnnnnnnnnnnnnnnnnnnnnnnnnnnnnnnnnnnnnnnnnnnnnnnnnnnnnnnnnnnnnnnnnnnnnnnnnnnnnnnnnnnnnnnnnnnnnnnnnnnnnnnnnnnnnnnnnnnnnnnnnnnnnnnnnnnnnnnnnnnnnnnnnnnnnnnnnnnnnnnnnnnnnnnnnnnnnnnnnnnnnnnnnnnnnnnnnnnnnnnnnnnnnnnnnnnnnnnnnnnnnnnnnnnnnnnnnnnnnnnnnnnnnnnnnnnnnnnnnnnnnnnnnnnnnnnnnnnnnnnnnnnnnnnnnnnnnnnnnnnnnnnnnnnnnnnnnnnnnnnnnnnnnnnnnnnnnnnnnnnnnnnnnnnnnnnnnnnnnnnnnnnnnnnnnnnnnnnnnnnnnnnnnnnnnnnnnnnnnnnnnnnnnnnnnnnnnnnnnnnnnnnnnnnnnnnnnnnnnnnnnnnnnnnnnnnnnnnnnnnnnnnnnnnnnnnnnnnnnnnnnnnnnnnnnnnnnnnnnnnnnnnnnnnnnnnnnnnnnnnnnnnnnnnnnnnnnnnnnnnnnnnnnnnnnnnnnnnnnnnnnnnnnnnnnnnnnnnnnnnnnnnnnnnnnnnnnnnnnnnnnnnnnnnnnnnnnnnnnnnnnnnnnnnnnnnnnnnnnnnnnnnnnnnnnnnnnnnnnnnnnnnnnnnnnnnnnnnnnnnnnnnnnnnnnnnnnnnnnnnnnnnnnnnnnnnnnnnnnnnnnnnnnnnnnnnnnnnnnnnnnnnnnnnnnnnnnnnnnnnnnnnnnnnnnnnnnnnnnnnnnnnnnnnnnnnnnnnnnnnnnnnnnnnnnnnnnnnnnnnnnnnnnnnnnnnnnnnnnnnnnnnnnnnnnnnnnnnnnnnnnnnnnnnnnnnnnnnnnnnnnnnnnnnnnnnnnnnnnnnnnnnnnnnnnnnnnnnnnnnnnnnnnnnnnnnnnnnnnnnnnnnnnnnnnnnnnnnnnnnnnnnnnnnnnnnnnnnnnnnnnnnnnnnnnnnnnnnnnnnnnnnnnnnnnnnnnnnnnnnnnnnnnnnnnnnnnnnnnnnnnnnnnnnnnnnnnnnnnnnnnnnnnnnnnnnnnnnnnnnnnnnnnnnnnnnnnnnnnnnnnnnnnnnnnnnnnnnnnnnnnnnnnnnnnnnnnnnnnnnnnnnnnnnnnnnnnnnnnnnnnnnnnnnnnnnnnnnnnnnnnnnnnnnnnnnnnnnnnnnnnnnnnnnnnnnnnnnnnnnnnnnnnnnnnnnnnnnnnnnnnnnnnnnnnnnnnnnnnnnnnnnnnnnnnnnnnnnnnnnnnnnnnnnnnnnnnnnnnnnnnnnnnnnnnnnnnnnnnnnnnnnnnnnnnnnnnnnnnnnnnnnnnnnnnnnnnnnnnnnnnnnnnnnnnnnnnnnnnnnnnnnnnnnnnnnnnnnnnnnnnnnnnnnnnnnnnnnnnnnnnnnnnnnnnnnnnnnnnnnnnnnnnnnnnnnnnnnnnnnnnnnnnnnnnnnnnnnnnnnnnnnnnnnnnnnnnnnnnnnnnnnnnnnnnnnnnnnnnnnnnnnnnnnnnnnnnnnnnnnnnnnnnnnnnnnnnnnnnnnnnnnnnnnnnnnnnnnnnnnnnnnnnnnnnnnnnnnnnnnnnnnnnnnnnnnnnnnnnnnnnnnnnnnnnnnnnnnnnnnnnnnnnnnnnnnnnnnnnnnnnnnnnnnnnnnnnnnnnnnnnnnnnnnnnnnnnnnnnnnnnnnnnnnnnnnnnnnnnnnnnnnnnnnnnnnnnnnnnnnnnnnnnnnnnnnnnnnnnnnnnnnnnnnnnnnnnnnnnnnnnnnnnnnnnnnnnnnnnnnnnnnnnnnnnnnnnnnnnnnnnnnnnnnnnnnnnnnnnnnnnnnnnnnnnnnnnnnnnnnnnnnnnnnnnnnnnnnnnnnnnnnnnnnnnnnnnnnnnnnnnnnnnnnnnnnnnnnnnnnnnnnnnnnnnnnnnnnnnnnnnnnnnnnnnnnnnnnnnnnnnnnnnnnnnnnnnnnnnnnnnnnnnnnnnnnnnnnnnnnnnnnnnnnnnnnnnnnnnnnnnnnnnnnnnnnnnnnnnnnnnnnnnnnnnnnnnnnnnnnnnnnnnnnnnnnnnnnnnnnnnnnnnnnnnnnnnnnnnnnnnnnnnnnnnnnnnnnnnnnnnnnnnnnnnnnnnnnnnnnnnnnnnnnnnnnnnnnnnnnnnnnnnnnnnnnnnnnnnnnnnnnnnnnnnnnnnnnnnnnnnnnnnnnnnnnnnnnnnnnnnnnnnnnnnnnnnnnnnnnnnnnnnnnnnnnnnnnnnnnnnnnnnnnnnnnnnnnnnnnnnnnnnnnnnnnnnnnnnnnnnnnnnnnnnnnnnnnnnnnnnnnnnnnnnnnnnnnnnnnnnnnnnnnnnnnnnnnnnnnnnnnnnnnnnnnnnnnnnnnnnnnnnnnnnnnnnnnnnnnnnnnnnnnnnnnnnnnnnnnnnnnnnnnnnnnnnnnnnnnnnnnnnnnnnnnnnnnnnnnnnnnnnnnnnnnnnnnnnnnnnnnnnnnnnnnnnnnnnnnnnnnnnnnnnnnnnnnnnnnnnnnnnnnnnnnnnnnnnnnnnnnnnnnnnnnnnnnnnnnnnnnnnnnnnnnnnnnnnnnnnnnnnnnnnnnnnnnnnnnnnnnnnnnnnnnnnnnnnnnnnnnnnnnnnnnnnnnnnnnnnnnnnnnnnnnnnnnnnnnnnnnnnnnnnnnnnnnnnnnnnnnnnnnnnnnnnnnnnnnnnnnnnnnnnnnnnnnnnnnnnnnnnnnnnnnnnnnnnnnnnnnnnnatcctcatgagtcatttttcagagagaataattggtttgcgggtatatatatctagaaattcttgcagaagaaatctcagttgtaattggtggtgcttcagtttctgttatgcccgatggagacaactggtagagagcaaattaagactgagacagagggtgagattagaggcacaaaggatggcgctgactttttggatgaaccaaaaaacttgttagagagagagagagagtgatgttgtggtggagcactgactcagttgggtaattcttaattatgtatccagggaaaaatgaacttctagtgagagtattttgttttgatatatttaattccatctcttggatttaggagtttattgtttgagagattttaatcttctgaaactaaaaaaggacaaaagcactttggttgcctttttgattgactatgttattatgtcaaagaggaaccctacctaaggtggcagcaacgtaataaggacgatgattccgatgcttccttacttagttgcctttgttttgttgtgttagacttagcccccacaagcatgttgcctgaaccatactcgtgttctgattggttagttcgcgtaatctaggaaacgtatagcagtgttgcagtggcaagctttgaaaattgctcagtccactgtcactgccatgtttctgcatggcttgccctacaaactggggcacactctacccctatgctgcgtttcgtgttttatgaataaaacttactactactattactactaagcctttttattttcgttcatccatgtaaacaggaatttcatattatattacttttacaccataaatgagattatgtctaaacatggaagaatctttaattccccttaaagtttggttatataatgtcctaaaaaatgtgtattttaatttttaagtcggtaacggtaacaaattttatattaaaatttgcattacggctggaagattttaattttgcatcatcaccaaacaattacaaaaaagtttaagagttcaatgacgtgtgaggacgtgaggtaaactagtttgaattcatatacttggtaattttcttttattaatattatcttatagtagtagttgctaaccaatgatgatataaagtaatataagtatcacaatcagcaatatgttgcgtttgatatttaattatgaataaaaaattaactatgaataaaagattaataattttttttagagattacatgtatttttcatgctattatctatcttttctataaatatatgtaagatgataaaattttgtttgagtattacacagttatacttatatgctcgggactaaggggcctagattaggttttagtctaatttacaattaaacataattaaaaagacaagttacgcaaatcagaaaaatgagtaattaaaaaagccaacaaataaaaataatcaggttgaaaaattaaaaaaacattttggaaattaaaaaaactgaaaaataaaataaaaatattataaatgtaagaacgaaatcaaagtattgttacacacaacaaatagttagcattggacagtcaaattattattgttttatgcttttttttcgagtaaatagatattttgatttctgatttttcatttatcggcattctcggtcccttgggagagcctaacaaaggctcaaatatccttaaagccagccatgacaatccattccatccatccttataccagatcacaacataaacaagttgagccactgtgatccccaactcgtgatatcaaatgccaaagttgcaccatctaagccaaaatctaacacataaattaagaaccagagtatcccaatgtgcagaattaaagccaccaacccagtccatccaataacgttaaccttgctctgagcttgaaggaacttttgcgttggaaaattgaagggaagtgaaagaaattgtggaattactaaaatggagaaactccctgcaggatcagctatatcttcctgttgaccaagaagcttcaaaattgtagcggcaaaaaatgtatataggcaagagcaagatactggtcagggataatatcacccatgagcgttgcatataaacaccaagcatattaacctgcccagcttcgaaatcttgtccacagagtgtctcagttgcactccccatcgatcccaagctacagtttttatagagtatcgttagattttgtgtttcttttaaaaaaacaacaggcaactaacaattacaatttctacagcttccctattgaatttgtcttctttaaaatgaagacatgcaaatacactcacaaactacatacctatgtaacattttaaaatggtaatgaaatcaaatacatgtatgacaaattctaaaattagctcaaatcttaattggccattttttaattaatagttatatatcgtatatcattaaagtgtactcccttcactttatactagtgaaaccagttggtttctattctctaagcaagctttcctgcaatatcctctgagaaatacacagcacaaggcttcgttcttgcttatgatttttttcttttatctgtagaaattgaactcagttacgtactagggaattcacaacaactcaagcacattattcaatcaaccgagttagattctcttgatcttgcttatgaattatgattttaagaaaattaaaatcattaaaattcaaaaaatctagtaagatgaaggaaaattcaattagggactgtgagaacaaaggaaccccctttgtatttagctagaaccaagtaaagtccataagattaaaacaaggaagaaacttatatggaaatttttcaagctgttctcggaacagaattgaattttcatcttgagatccgaagctggcctttaatgtaaacacttataatgtaattatcaaaataaacttaaattctaatcagaacaacatctaaaaagcaatacaaaggcactaaccatgaaaccaaaggcaaaagtgtcaatgacggagttaatgagagagatagcagagagctgaatgtggccgaggtgtccaacgaacatgctggtgacggagttgacaccgaactgacaccatatgttgaaaacgatgggcatcgcaatgtcccacactctcttggtctcaatccaaaacaccttcttgacctccttcagctccctcaccgccacgtagtcaccattctccgccacccgtgccgcccccttgccgttcaccctgcaccttattattgaattgaagtgagggaggacaaagatagggaggctattattttaacagtggaagttagattttaacgatagacacttatttgcataacggatgcaaaaatatgaattataataccaaagcatacagcagcaggagacaaagagcatgaaacaggggtgcattcacaggacacacagaggtacagttcgcaggaaaatccaagagggtcaccacaaggcaggccctcttacctcatagattacatatgaagcttattgtgagaaaggaagctgaccaggatgggccaaatgaaatgcacaattgcagattggtggcaacagggacaccataaccataaatggaattagccaatgatttagaaaatataccttgagggacaaattctgttattaggaaactaatataaataaagcaattgtaaaatgatgagatatgaacaaaatacaagcttcctttccttctgtgtcttcttctcttgtgaaaacatttaatgcccataaaggagagagagagagagagaaggtgacgctgtttacacaaatgactgcatgaatatttcgtagcttacgtgatttcgtagcttacgtgaaaagtatttatacaaaggaagagaaagaaggtaatgcaaaagctggttgttataccagaaaaaccgaaaacgctaactgcttgtaactaataactaacaagactaaaggacttatgctaagatctcttttcttcttcctttggagatgctggtctcgaatcgagctttctgctatcagactaatttgcataaaggatcaaaagttacataccaaagtgtctatttactccttctttttctataacatatgaaacataattctgttttggcaactttgtggataaaaaggaaacttttgaatttgtagagtatttgtgtgtattgaaacctatacatgattgtcgatgactgcaacgtagtacgaagatataaacaaccttttcaagtgttctgcttgaaaagaaattaatattgtttttaaaaggaaaatcaagctaaatatgggaaagaatcagactacttaagtggtttgtaatatacttttaacaaaagaatagaatcattctcataaaatattttaatattttaatacatggatctgtgaaaggtctgattggaaatcattagttggatgccgaacccatcatagcgtgtgtttgtatatgtatttttttttaactaatttcataaattttgttgaatagatattttttatttgattcgtatattacaacattttaaaaattaaatatcctaaaaatgatttttgttgtctaatctataagataaattgatttaattagggtcatgacaaaattttgccagcttctattttagtctgctttgctttagaatatttacattcaaataactattttataacagaacaaaaaaaagctacttattgattctacatataaaaggattgattatactattctttccgacaattttttttatgaaagccaaatttaaataattattaaggtattcaagcagacgtaggcaaacagcttttttactttcgtattcacaattgaaagtcgtgtttcgtgtatttatttatttatttttgaagtcgtcgatcatgtttttcatattttgtcagtcttgtcacttttgaacactttttttatagacaaaaaatatattatataaaaaaaaaaccaaacttatcacaacatgtaacacgttggcaaacagtagatctcaaccaaacgttcgaaatcttttgaatattatatatgtggctattggcagtgctaaactcagcagtatcagtctaattccaatattgagtatatttgttcaatcactttttctttgtgatgataaccaccaaaatgccaaccatgaatccagatagtttcaaattcatagaagccataataatattaatggtgtgtttgatgatgatgatgatgatgttgcaggttgtttgtgctgaagaggaaataatgtgcattgagagggagagggaagcactcctcttattcaaggctgcacttgtggatgactatggcatgctctcttcttggaccactgctgattgctgccggtgggaagggattcgctgcagcaacctcactgaccatattctaatgctcgaccttcacagtttatacctcagaggagagatccccaagtcgttaatggagttgcaacaattaaactatttagatctgtcagattctggttttgaaggaaaaattccaactcagttaggctctctttctcatttgaaatacttaaatctttctgggaattattatctggagggttcaatcccacctcaacttggaaatctctcccagttgcagcgtcttgatctcagcttcaattattttgaaggaaatataccctctcaaattggaaatctctcccagttgcagcgtcttgatctcagcagaaatagatttgaaggaaatataccctctcaaattggaaatctctctgagttgcggcatctttatctcagttggaatactttggaaggaaatataccctctcaaattggaaatctctccaagttgcagcatcttgatctcagctacaattattttgaaggaagtataccgtcccaacttgggaacctttcaaatttgcagaagctttatcttggaggaagtgtaccgtcccgacttgggaacctttcaaatttgctgaagctttatcttggaggaggaagtgtaccgtcccgacttgggaacctttcaaatttgctgaagctttatcttggaggaggaagtgtaccgtcccgacttgggaaccttccaaatttgctgaagctttatcttggaggccgatcatattatggtggtgctctcaaaattgacgatggagatcgttggctgtctaatctcatttctttaacccatctttccttggactccatatctaatctcaacacttctcatagcttcctcccaatgattgccaagctaccaaaacttagagaactaagtttaattcattgtagcctttccgatcattttatcctttcattgaagccctctaaattcaatttttctagttccctttccatccttgatcttacctggaacagcttcacgtcatcaacgatactccagtggctgtctgggtgtgccagattctcgcttcaagaattgaacttaagaggaaatcaaatcaacggtacgcttcctgacctttcaatattttctgccttgaaaagattggatctttcagaaaatcaattaaatgggaaaattctagatagtaccaaattgccacctctgttggagtctttgtcaatcacttcaaacattttggaaggtggaattccaaaatcatttgggaatgcatgtgctttgcgctcattggacatgtcttataatagcttgagtgaagagtttccaatgataatccatcacttgtctggatgtgctagatattcattggaacgattatatctaggcaagaatcaaatcaatggtacactacccgacctctcaatattctcatctttaagagaattatatctttctggaaacaagctaaatggagagattcctaaagatattaaatttccacctcaacttgaggaactagatttgcaatcaaattccttaaagggtgtgctcactgactatcatttcgctaacatgtctaagttagacttcttggagttatctgacaactctttattggccttgacatttagtccaaattgggttccaccgtttcagttgagccacataggattgcgatcttgcaaactaggtccagtatttcccaaatggttggagacacaaaatcaatttggggatattgacatttcaaattctggaatagaagatatggttccaaagtggttttgggctaaattaacatttcgagaatccatttcaatgaatatttcacacaataatctccatggtataattccaaattttccactaaagaatctttaccattccctaattcttggatcaaatcaatttgatggccctattccaccatttcttcgaggtttcctgtttcttgatttatccaaaaataaattctcagattctctttcatttttatgtgcaaatggtacagttgaaactttgtaccaattagacctttcaaataatcgtttctctggaaaaattccggactgttggaaccatttcaagtcattatcttatttggacttgagtcacaataatttttcaggaagaatacctacatccatgggatctcttcttcatcttcaagcattgctattgagaaacaacaacttaacagatgagatacctttctccttgaggagttgcacaaatctagtaatgctagatattgcagaaaacaaattatcagggctcatccctgcttggattgggagtgaattacaagagttgcaatttttaagtttggaaagaaataatttccatggaagtttaccattgcaaatttgtaacctaagtaacattcaactcttggatctctcaataaataacatgtctgggaaaattcctaaatgcataaaaaaatttacttcaatgactcgaaaaacatcttcaggagattatcaacttcattcatatcaggtcaataccacttacacaagggttaaccaaacatatgatttgaatgcactcttgatgtggaaaggttcagaacgaatattcaaaactaaagtgttactacttgtaaaaagcattgatctctcaagcaatcacttttctggagaaattccacaggaaatagagaatttatttggattggtttcattgaatttatcaagaaacaatttgatagggaaaattccctcaaaaattggaaagctaacatcacttgaatctcttgatttgtcaagaaaccagttggctggttcaattcctccgagtcttacacaaatttatggcctcggcgtgttagatttgtcacataaccatctaactggaaaaattccagccagcacacagttacagagtttcaatgcctcgagttatgaagataatcttgatctttgtggacagccacttgagaaattttgtattgatgggagacctacacaaaaaccaaatgttgaagttcaacatgacgaattttcacttttcaatcgtgaattttacatgagtatgacatttggatttgttataagcttttggatggtgtttggctcaatcttattcaagcgttcttggagacatgcctatttcaagttcttgaacaatctatcagacaatatttatgtcaaggtagcagtatttgctaataaaatgtcaaaggtgtatggctgaagcttaactaggtaataatattgcagccctttcatatatatatatatatatatatagtttcttttgctttcatatagtttatatacatgaaagattccatatatattataatttggaattgtgacagtaagatttcataatttttaactattttagtataataaattttgaagaaatattgaataagttatattaagattaattaataatataaaattatattgttactgtataatcattaaaattatcattattgatgtataataagcctgaaacatcgttgatctctattattattataaatgtttttcttataagagattttactctatcgttaacttgatgatattattctgattacttcattttctagaaatttcttttttacatgtataagaattttatttattttcagttacacattttgaaaactgacattctgattatattttctttctttccttccttttttttttcagtaccttgaagacactagccctcttggatcggaaaactccaatgtctaagcttgttaatgcttggaaaaggcaattagttggaaattatgattgctttagatttcttcactgtcaattgagatacttataccatgttttgataatttgaaaaagactctagtttaattagtgttgtgctattgaaatgaaatataacttatcatgtattatatcattaatttacgtacgtacatctttctcataatcaaaattttggtttgacaaacacattatttagttaaaatttttgacaggggtccattcttaattttttttaagaataaaagaaattagaaaattgcacgcgcatattttgaatgaatgaatttataatcataattagtacagaataatttgaccacatacatatgttcaaattatatggagatcagtccaatttccaaattatgcatgccttttgttttatgaaataataataaattattattaattattaatctatgctaataataaaggaaacatctctatttgatatccacatttcattaaatagctttatctttaaatcacttcttaaacttctcctgctctttcctaataactatccatcattctcatatggttaattattttattttaacttctaaatcttttccttttctttatttttatatttatttaaaatatgtaaaaaaaattggagtgtctctctcccctaatgtgtcaatattatgcatttaagtattacccatcaatttgctatagggaaaaaagatttacacttattgtgcataattgcaatggactggactgtggagaaagaatggaatacgtgtttcccacgagatgtaagtgtatctaatcattcataatttaaataaaatacaaaattctcgtgagcaataaaaaataaaagaaaatgttaaaatttacaagtgattgtagaacatcatatgtactaatatttatgtttatattcaattcattaatcaaattattattaagtatagtgagtttttttaaaccttcaccaaatatttggtacactaattattatttacttttatttaggctaaattatttttttacttatattgaagtccgaagaaagcatacttgaaaatgtagatgaagttagtgtaccaagatcttgaaaaataaaaacaagataaaagttgtgtgaatctaccgttagagtgttagctacattaagggaaaagatcctctatattttatctctctatttcctccatatcttttattcttataagctttcaagaatatgaatcaaataaagatgatatgtattttatggggagtagcatttatattttcagaagcttaacaatgaaagaaatggaataaaaaatgaaatatccaaatacctacattaagtactgtatgtgttgtttattcatgccttttatttattctcatttacacattttgaaaactaacattatgttttcttttctttctttctttaattttttttaaatttcagtcccttgaagacacttagccctcttggatgactgcaatgtctaagcttgttaatgcttggaaaaggcaataagttgaacattatgattgctttacatttcttcgctgtcaattgggatggtttcaagcagactagctttattaattagcgtcgtgcttgtaatgaaatatatattatcatgtattatatcaataatttatgtgtatctttctctcataattaaaatttcagtttgacaaagacattgttgagttaaacattttgataagggcctcattttcaattttttaagaatcaaagaaacttagaaaaatacaggcacagattttgaatgaatgaatctaacatcaccattttgtcataattagaacaaaataatttgaccccatatgtttaaattatatggagatcactccaatttccaaactatgcatgccttttattttaagaaataataataataataataataataataataataataataataataataataataataataataataataataataataatctaaattattaattattaatctatactgataataaagaaaatatccccatttgatatccacatttcattggataattttactttaaaattacttcttaaagtttgaaaattttcttatcacctaacgtaactttctactacttatctacattgttatttttttattctatcactttttttattaaatgtatttaacttctgttttttaattgttttacttattatttaaaatttacataggcacgatctatcctctagttattaataaaataaataccctttttagtgtccaaaatttttagtgcactattaatgaccgagttaaaaacattttgatgcaatccaaatatggccctttcatcagtctaactatggaacttagtgattttttttttaaaaaaaaaagaatggaactaagtattatatttgactccttttcatcaatcaaaatataacccaaagaaaatgttgaagttacatagcctgaggatagaatgcaggatttctaacgaactcatgacatgactggttatgatcattttaagagtgttaagagcgggcagatgtctgaacaagtataattgtgaagagctaatattctgacgactcatctaatgttaagatagatgtattcctgacttaatcatagatgaaggtttgtcattcagaacctaggaacctgaactaatgtgttaaatggggaaattagaatagatcaaacagaaatactgaatattattaattatggatctctgaactctagatcatttcatgcaactttgctcctaacagaataacataatcaattaaaatcaaattagagtagtaaaattctaagagacttacatcaatccttatcttttgatctaattttaatctaatgattctaataaacacgtgcctctgttttcagcctccctcgtccccaccgtcctaaattctttgttcaaaccttgattattggttaccacgcatctccctctgtcattctcaaggttgcaattctgtatattttcgattattggttctttacattggcacacctatttgttgttcaagtttaatttagccattttttgaatgaattaaagcttattaacgtaagggatcaaaagaatgaattatataaaactaataaaaggccttctccacagctgaactttaattgctatgagttatttatatcaacctaaccccattatcttactttgattcctctcaattcaaagttatttttatgctctcacaattcaaggtagcatcttcacaagcttcttgaatctaaagttcacaattttaaggaataattaatttttaagtccttgaatttttctaaattttaaatttcagttcctaaataaagatttaacttgtaaaagtgctcaaaattttatttagttacaacttttagttgctgccgtcatttgatgatgaagtggtgtcatgtgaaacaacataagataatcaaccccgactatttggttctggacctcggctgtcagttgtcaaagcttgggtcaacccttccacaacgaccaaatcctcattaaatttataattttagaatttatttttatttttactgtccactattcaccaaataatgcacatgataaaaagttatcaatgcatcatttgtaactttatgtttgtgatactttattctccttgtattatacttaattaagtatgtatcaaacgcatttttaaagtacaaagaaaaattagcattaattagtcatgaatcaatttatatgtaatttattaaaaaatctcactacaattttcatgactccagtattggtgacaaaagaaaaattttgtcccttaatgctttgactttttgtgaaatttctgatgtaagaactcaattattgagttcttgattttttttactagtgagtcctttgtttaagatgagtactcactaatttttactctaattaatggtaaaaattaattgatttcttgtttattttttagtagatcctattttatctttccactcacacaataataatcttttttttagttgaatttttttccatcgttaaacaatcttgattgtagttgcttatatataagaaacttccaagatagaagctttctaattttaactattaagcagtacagttgcacaatcaatttacaaaattctgattatatgatacagcatacctaaaatgtttggtgtaaaatattcctacttcctacaaagccattacatcttccaaaaccatgcatgacataacacataaatcccctaatacaggtgctcatttgtatgtagacaaaaacgaaaaccgagaacccattcctaaacatagtgcatgatgatctacacgtcctttggagaataaatgtgtgtcgcagaacttgttctttgaagatgaatggtcgcaaatccaataataaaatttctaggttttaaaaatcttttaactagttcatttggtcctctcggaaccattttaatgtgaatgatggttgacattgagacattaatgaaacttgcacagcagcttcatttgcaattgcctttgccagcattttatttgcagtaccaactcttgaagtgattctttgatctcatccaatgcaccaacatctgcaagtctaactcctatttcattttcatggataagctctggtcttatgcgcttctcaagaacttcctgcaagcaagcaattactatacataagtttaagtagacaagaagcacagaaaagtgcaaacgacaattgttccatcatctaaaagagggtgacgctctaatctcaaatatagtgctatgtttaaccagaaaactaatatgaatgataacaaatcaacagtaagtgttatgtgcacataataagcactaagtaacatttgtataacaaaataagctatctttaatcacaaaaagtacaaattaaagtatgctatcagagtcattgtttgatttacttcagaaaaacatcacgaatttatcaggaaagatgcatcactcatgttaaggtttcgaaaactgatgctccacagctagcgaatgttaacgtaaaagaataaagaacagaatacgagaaatgcttttctctctatgttttcattcagaatgttgagagcctttcattggcgttttgttgttcgattcatttcatttcattggcgagcctctttgtccgttgaattacacccgctgcctttacacatacaccccttgcattttgggcctagtccgttttcaagaagtcttagataaaataaatattgctagctacacccctttctccatgtatgcttctcaatgtatgcaatttgactttgaccctaaattaataaatgaataaatataataataataataataaataaattgatagacaactctttatttttatttaatttttctagttgtctctattatttatcttattcgtcaatttgattgtttttttcattacccaattagttagtttaagttataatgtgctctaaatatcccgctgcacatattatttttccccgcatttcaaccccgtacccttaattacttagtatatttttcacttttattctatctttttctattctcatttgatttatttgatttcgtaacactattattcatttgtctttgcagttttgcattagtgttcattggtatgcacttacgttttgtacactccatgctaagtctttgacttgcttagtagtatttcaataatatatgagtaaattttgtaaatgtcatgactttacaaagtttacagcaaacccaacatcttctctaaagagggaaaaaatactcaaataaataatcactcaatttatcttttttatgtttcgtgcacctcatgttaggttttcaacctacttgatggtgttttaataacatgtgagtaaattttgctaatgtcgtgttaagtctccaattttcttgacttcgtaatgtttatcacaaccaaaatcttttcttaaaaagggagtaaaaatattcaaataaatgaacattcaattttttttctcaatgaatattacacattactcgagatcgtttcaatgccttaagtgattctctctattatttttttaaaattttaatattatttcaaggtccaacattttaacgactcttattcacacaattaaatacaaatcattcaaaagaagataaaatcaaccaacacacaagttattttttacccaaagaactacataagtatgatttcctcattacaccagcgaatatgtatgagtgaggaaaaatcccttgtcgacctaaaacactacgaaataaaatcataaaatttcttctttactaaaaataaaaatttgctatcttttttttaaaattaaacaaaatataacaaacataattcatgttctcaaggaaagataaataattaagaagtcgtttttatttttattagactgaattaaaggttgtcatattcatgacggatacatgaggtgttaatacctttaaataacttccaaatcttttttttccatattgtaaatcattccttatttttttttttttttttgacattttccttaaataaacattgataacgactccccaattttcttttggaaaactcactcgaccgccacattgcgacaatcacaatattatttacaaaagaaattatagtaataatatgtagtggaaaacacaaatcatatttctttttttttaaaaaaagaataaattcatatttcttgatttcagtgttagttacaaaaatgttacttttgagtcctatgctcaaaattttaaataagaggggaaaatgttgtaaaaaaatataacaaaaaagttataattttttattcaaaaacgataagatgttacttccatgtttggtttggtttaaaataaaaattatgaaacttaaaactacaacttaaaactgattatcaataaataacaataggtttgggcagtaggctcatgcatcattaataaagaaaaaaccaacaactaccaaattctaattcagaatgtaaacaaaactcaacctggattcgattagaatcaaaatactcaaaactaaagtaaaatcctcgttcaagtatacagtatacacacctagagaaacagcaccaaagtttcaagatacaaccaataagttagttccggttcaagttgtcatttcagcaaacactataattttcaaaagcaaaaacaattctccctaattatcaccaagattgtaaccatataagtttgaatggtttaagacttagagtctgatcggatacaaagttaaaaatgcttttgagagtttctctactaaaaaaattatatatttttaatagaaaaaatcttaaaaatacttgtgacttatctaaacaggcccttaggattttcttcggtacaagatatgaagatcaataaatattatctggattacgaattatatactatcgcagatttaataataaagtagttttatcgttcttataattaaaagaaaaaaatatatcttttattttttatatataagaccgtaagtaggtagtatattatacagaacttacataagcaccactttgttgacgcagaattccttcaaaagaaattatcaatcaaaatcaatgaagtaatagtctctatattacgttagcaacatatagataaaggtcaatgtgggtatcttgcgaattttctaagtctttttgttttgttcctaagtacaaagtttatttatgggccatgcatgtcacctcacaaaattttccacatttgttatttagcgcaatgactggaatcttaaattctaaagtctttatggttttgtttggttcctacatagtcatataaatggtcatgtcactataaaaaaaattcacatctattatttttgtaggtagtgcgatgactggagtattttctacgtctttctttgttttgttccaatggagtcgtgtaaggaccatattactttataaaaattttcatacttaattgttttatgtaatgtgatgttgattggagtgcttcttaagtccctctttgttttgtttccggtaagtcgtcatataagggcatgccacttaataaaaattaatttccaattctctgtttgaaaataaatgatgtaactatgataagtcttatgggtcagatattagtccacaaaatattaatatgaacacgtactcaatttgtaattccttagagattaaggtgtatatatatttccaaaaaaaaaatgtcaagggaggttaaaaaaagaaaaagaaaggagttttaagacttaggattttctttagcgcaatatatcaagatcaatgaatattgtcttacgaattatatattattgcagatttagtaataaagtagtcttaggattcttataattaaaaccaaaaaaatgtgttgtcttttatttttatatatggaagaagaggtggtattattaaacatgtcaagaaatccgcaggtctgtagagttgtttaaccaaccaaactcaaaagaaacacattttagtgaaatccaatggaagaagactcatatatatgaagaggtactagttcactcgttcatcagggttaattgtcgtcggttcgttcgtgttttctgatttgaatgtatgtgaaaatcgcaattcaaatctgatttgatatcaataaatttaaattttcttaaatttttatcctcagttttatttttgcgtcattttctccttcttaaaatagatcattcttctgtttttgttcattgtttcctgggttcatagtgtttcggattgaattagaggttgaaccaccatattttttgtcccttgcttttggtttttaaggttgaactatcatatatgtagaggtagaatcatccaatttcaaccataatgtgacaacaaaaactacaacaacaaaagtagaagccaccagtaataataaccatactagagaaaatgacatatacagggatgacaaagataacgacaataattatattaaattcttaatacaatattttttattttttgttcccattttagtcttcaaattggcctttctcttaaggtcctaatataactcatctccacttaaacaaataaaacacacaatagactttattttgaatctttctcccacacaaaaaaaaaaaatgttggcaccatacacttttttacatgtagagtatagtgactttttccaatttttgaatgtcatcactctttttaagtatgatattctattagttatatttgtcaatcatacattattttcatgacaaattgatgatatattttttcaagtcctattaattaagaaatttaatctatatttgatatttgatatattgatgtatggtaataatgaaattatagccaattaagaattttaaaaattgtagaaagtattgatttttggtgtgaatggaattgttttaatatattgaatattttagtttttttctcaatatcctcttcttcctttatatatatatatatatatagtcttcttccttaagaacatgctcactttaataaaaaaaaatatttatgggtctattaatatctagggcaaatagattaattaactttaaatttgaatgtcctcttcaagcatggtatacgtttttaaacttaattttttcttcttcaataagaacatggtcactttttccaactaaacccaatttgaatgccacttcaagcacggtatgattttaatgtcaattgcatataatttgaagtcgtgcacttgtttaggatgatttggatggaaataaattgggaagaagtgaaggaaaatgaaatggaaacttttggtttagatgggatggaaatgaaaatgaagtaaaacaaatttagtggagtccaaaaaaaaaacccctaaaaaacagtggtgaaatggaggattatgtttgaagcaatattaattttatgggaggctaggattcctaaataatataaaattcactcattttttttcatttttatttatccaaaaaaagataaattttccacttcgtttctcttttatttctatcttgttttttctctttcatctctaatccaaataaagtgcaaacgttgcggatgagttaatttttttaaaagttcatttttctttcaaagtgctgttttttgtttgcataaattgaaaattttgtgcatattaattttctaattattttaaatatgaaatttcctttcgatatacgatcaacttttgtgtgacttgttgactggagacttttccaagtctccccttgatatatatcttttagaatgctacattattttttaagtcttttatttatttatttggttatatattaaattgaaaaataaaaagaaaagtgggaacctaagctggaattgtgccgttgttgtgtggttatcgtcacttccactcataagaaaatatactagattaagtacattttagcatctttaaactcaaaaacagtttagtcaaaatgcttaaccaaatataggtcaagtaattagtgcacaaaatctcactcatagtgtttgccaccatagatttaggttgtgtataggacgattacttaaaatattgttaattgatagtagaaactttagatgaaattaaaaagttttaattattctgaaaatagttgtggtagaaataaacaggaccacagaagccataactattatttagacatgttgtagtaccaatactaggtctgattggaaattagctgtgttgaacccatctcatagcgtgcatgcgtatatgctccaaatctctttaacaaattaaataccaagcttttttttaatctaatttcctcttttttttctctttttttatgcttctgaattaaagataatataataattcataaatcttattcaatataatgagttaaactaaatccccttagctatccaaatccctttaacttttaaataacaaaataaaagttatacacacttttatattccaacatttttatcattattcatagttttagttacttgtttatattttagaaacgtcataatactcacttcttttgcttttatatttataagataaatatatagaatataacatgtataatataaataatataaaaagaggtgataatttaaaaaaaaaaagggaaagaaataattataaaataaacacaactaataagactatttgcgtcaaaagaaattatttgaatatattttacatacttggaagaatttgagtggcccaaccgttgagaaatgtgtgttctattaaccatcccgatgttatatatatgcatgcctattggcagtgctaaagtcatcagtatcattctaattctcatattcagtgtattcatttcatcaatcactttgtctttctcatcataaccaccaaaacgccaaccatgaatccagatcgtttcagatacatgcaagccctaatgtttatgatgttgcaggttcgttcgtgttttctcatttgaatgtatgtgaaaattgtaattcaaatctcatttgatttcaatgaatttcaatttccttacatttttattctcagttttaatttcacaccattttttccttttaaaatagatcattctcctatgttttgttcattgttttttgggttcatagtgttttggattgaattagaggttgaaccaccatattttttgcccccttgattttggttttcaaggttgaacctgtgtagaggttgaattacacagttatacttatatgctcgggactaaggggcctagattaggttttagtctaatttacaattaaacataattaaaaaaacaagttacgcaaatcagaaaaatgagtaattaaaaaagccaacaaataaaaataatcaggttgaaaaattaaaaaacattttggaaattaaaaacactgaaaaataaaataaaaatataaaaaatgtaaggacgaaatcaaagtatgttacacaataaataattagcactcagataatttgtttcttttttgagtaaatagacatttgatttttgatcccccagcctccgtcccatgggagagcctaacaaaggcccaaatatccttaaaagctacaggttttatagagtatcgttagattttgtgtttctttaaaaaaaaaaacaacagacaactaacaattacaatttctacagcttcccttttgaatttgtcttctttaaaatgaagacatgcaaatacactcacaaactacatacctatataacattttaaaatggtaatgaaatcaaatacatgcataaaaaatagttatatatcgtatatcattaaagtgtactcccttcactttatactagtgaaaccagttggtttctattctctaagcaagctttcctgcaatatcctctgagaaatacacagcacaaggcttcgttcttgcttatgatttttttcttttatctgtagaaactgaactcagttacctactagagaattcacaacaactcaagcacattattcaatcaacccagttagattctcttgatcttgcttatgaattatgattttaagaaaattaaaatcattaaaattcaaaaaatctagtaagatgaaggaaaattcaattaaggaaaattcaaaaaatcattaaaatcattaaaattcaattaaggaaaattcaattagtttctgggtatttatttagaatttgacacaaaattaaattaatgcatggatctgtgaaaggtctgattggaaatcattagttggatgccgaacccatcatagcgtgtgtttatatatgtatttttttttaactaatttcataaattttgttgaatagatattttttatttgatttgtatattacaacattttaaaaactaaatatcctaaaaatgatttttgttgtctaattaataagataaattgatttaattagggtcatgacaaaattttgccagcttctattttagtctgctttgctttagaatatttacattcaaataactatttgataacagaacaaaaaaaaagttacttattgattctacatataaaaggattgattatactattctttccgacaattttttttatgaaagccaaatttaaataattattaaggtattcaagcagacgtaggcaaacagcttttttactttcgtattcacaattgaaagtcgtgtttcgtgtatttatttatttatttttgaagtcgtcgatcatgttttgtcagtcttgtcacgtttgaacactttttttttttatagacaaaaaatatattatataaaaaaaaccaaacttatcacaacatgtaactcgttggcaaaccgtagatctcaaccaaacgttcgaaatcttttggatattatatatgtggctattggcagtgctaaactcagcagtatcagtctaattccaatattgagtttatttgttcaatcactttttctttgtgatgataaccaccaaaatgccaaccatgaatccagatagtttcaaattcatagaagccttaataatattaatggtgggtttgatgatgatgatgatgttgcaggttgtttgtgctgaagaggaaataatgtgcattgagagggagagggaagcactcctccaattcaaagctgcccttgtggatgactatggcatgctatcatcttggaccactgctgattgctgccagtgggaagggattcgctgcaccaacctcaccggccatgttctaatgctcgaccttcacggtcagcttaattattattcatatggaattgcctcgcgacgttatatcagaggagagatccacaagtcgttgatggagttgcaacaattaaactatttaaacctcggttcgaattattttcaaggcagaggaatcccagagtttcttggttctcttagcaacctgagacaccttgatctgtcaaattctgattttggcggaaaaattccaactcagttaggctctctttctcatttgaaatacttaaatcttgctgggaattattatctggagggttcaatcccacgtcaacttggaaatctctcccagttgcagcatcttgatctcaattggaatactttcgaaggaaatataccctctcaaattggaaatctctcccagttgcagcatcttgatctcagcggcaataattttgaaggaaatataccctctcaaattggaaatctctcccagttgcagcatcttgatctcagtttgaattctttagaaggaagtataccctctcaaattggaaatctctcccagttgcagcatcttgatctcagcggcaattattttgaaggaagtataccgtcccaacttgggaacctttcaaatttgcagaagctttatcttgaaggtcctactctcaaaattgacgatggagatcattggctgtctaatctcatttccttaacccatctttccttgctctccatatctaatctcaacaattctcatagcttcctccaaatgattgccaagctaccaaaacttagagaactgagtttaattgattgtagcctttccgatcattttatcctttcattgaggccctctaaattcaatttttctagttccctttccgtccttcatctttccttcaacagcttcacgtcatcaatgatactccagtggctgtctgggtgtgccagattctcgctccaagaattgaacttaagaggaaatcaaatcaacggtacgcttcctgacctttcaatattttctgccttgaaaggattggatctttcaaaaaatcaattaaatggcaaaattctagagagtaccaaattgccacctctgttggagtctttgtcaatcacttcaaacattttagaaggtggaattccaaaatcatttgggaatgcatgtgctttgcgctcattggacatgtcttataatagcttgagtgaagagtttccaatgataatccatcacttgtctggatgtgctagatattcattggaacaattagatctaagcatgaatcaaatcaacggcacactacccgacctctcaatattttcatctttaagagaattatatcttgatggaaacaagctaaatggagagattcctaaagatattaaatttccacctcaacttgaggaactggatttgcgatcaaattccttaaagggtgtgctcactgactatcatttcgctaatatgtctaatttatactccttggagttatctgacaactctttattggccttgacatttagtccaaattgggttccaccgtttcagttgagccacataggattgcgatcttgcaagctaggtccagtatttcccaaatgggtggagacacaaaatcaatttagggatattgacatttcaaattctggaatagaagatatggttccgaagtggttttgggctaaattaacatttcgagaatccatttcaatgaatatttcacacaataatctccatggtataattccaaattttccactaaagaatctttaccattccctaattcttggatcaaatcaatttgatggccctattccaccatttcttcgaggtttcctgtttcttgatttatccaaaaataaattctcagattctctttcatttttatgtgcaaatgatacagttgaaactttgtaccaattagacctttcaaataatcgtttctctggaaaaattccggactgttggagccatttcaagtcattatcttatttggacttgagtcacaataatttttcaggaagaatacctacatccatgggatctcttcttcatcttcaagcattgctattgagaaacaacaacttaacagatgagatacctttctccttgaggagttgcacaaatctagtaatgctagatattgcagaaaacaaattatcagggctcatccctgcttggattgggagtgaattacaagagttgcaatttttaagtttggaaagaaataatttccatggaagtttaccattgcaaatttgctacctaagtaacattcaactcttggatctctcaataaataacatgtctgggaaaattcctaaatgcataaaaaaatttacttcaatgactcgaaaaacatcttcaggagattattatcaacttcattcatatcaggtcaatatgactgacaaaatggttaacctaacatatgatttgaatgcactcttgatgtggaaaggttcagaacgaatattcaaaactaaagtgttactacttgtaaaaagcattgatctctcaagcaatcacttttctggagaaattccacaggaaatagagaatttatttggattggtttcattgaatttatcaagaaacaatttgatagggaaaattccctcaaaaattggaaagctaacatcacttgaatctcttgatttgtcaagaaaccagttgactggttcaattcctctgagtcttacacaaatttatgacctcggcgtgttagatttgtcacataaccatctaactggaaaaattccaaccagcacacagttacagagtttcaatgcctcgagttatgaagataatcttgatctttgtggacagccacttgagaaattttgtattgatgggagacctacacaaaaaccaaatgttgaagttcaagaggacgaattttcacttttcagtcgtgaattttacatgagtatggcatttggatttgttataagcttttgggtggtgtttggctcaatcttattcaagctttcttggagacatgcctatttcaagttcttgaacaatctatcagacaatatttatgtcaaggtagcaatatttgctaataaaatatcaaaggtgcatggctgaagcttaactaggtaataatattgcagccctttcatatatatatagtttcttttgctttcatatagtttatatacatgaaagattccatatatattataatttggaattgtgacagtaagatttcataatttttaactattttagtataataaattttgaagaaatattggataatttcaagtcaatagatattagtccttgagttatatacattattagttaaactaattaagtttattggtttaactaattaagtttatttgagagatgatatgaatatatttattgaagttaaaacatatacatggaatatatatatatatatatatatatatatatatatatatatatatatatatatatatatatatatatatatatatatatatatatattatttcatattgtgagtctatcatttactactatggatatgataaatttatggtattttagataagttattaattaataatataaaattatgttgttactgtataatcatttaaatcataattattgatgtataataagcctaaaacatcaatgatcactattattattataaatgtttttcttataaactattgagattttactctatcgttaacttgatgatattattctgattacttcattttctagaaatttcttttttacatgtataagaattttatttaatttctgttacacattttgaaaactgacattctgattatattttctttcttttcttcctttttttttttttcagtaccttgaagacactagccctcttggatcggaaaactccaatgtctaagcttgttaatgcttggaaaaggcaattagttggaagttatgattgctttagattttttcactgtcaattgagatacttataccatgttttgataatttgaaaaagactagtttaattagtgttgtgctattgaaatgaaatataacttatcatgtattatatcaataatttacgtacgtgtatctttcttataatcaaaattttggtttgacaaacacattatttagttaaaattttttataagggtccattcttaattattttttttaagaataaaagaaattagaaaattgcatgcgcatattttgaatgaatgaatctatagtcttaattaggacagaataatttgaccacatacatatgttcaaattatatggagatcagttcaatttccaaattatgcatgccttttgttttatgaaataataataaattattattaattattaatctatgctaataataaaggaaatatctctatttgatatccacatttcattaaatagctttatctttaaatcacttcttaaacttctcctgctctttcctaataactatccatcattctcatatggttaattattttattttaacttctaaatcttttccttttctttatttttatatttatttaaaatatgtaaaaaaaaattggagtgtctctctcccctaatgtgtcaatattatgcatttaagtattacccatcaatttgctatagggaaaaaagatttacacttattgtgcataattgcaatggactggactgtggagaaagaatggaatacatgtttcccacgagatgtaagtgtatgtaatcattcataatttaaataaaatacaaaattctggtgagcaataaaaaataaaagaaacgcaacatgttaaaatttacaagtgattgtagaacatcatatgtactaatatttatgtttatattcaattcattaatcaaattattattaagtatagtgagtttctttaaaccttcaccaaatatttggtacactaattagtatttacttttatttaggttaaattatttttttacttatattgaagtccgaagaaagcatacttgaaaatgtagatgaagttagtgtaccaagatcttgaaaaataagaacaagataaaagttgtgtgaatctaccgttagagtgttagctacattaagggaaaagatcctctatattttatgtctctatttcctccatttcttttattcttataagctttcaagaatatgaatcaaataaagatgatatgtattttatggggagtagcatttatattttcagaagcttaacaatgaaagaaatgaaaaaaaaaatgaaatatccaaatacctacattaagtactgtatgtgtttgtttattcatgccttatactttttattggaatttattatttttcttgaatctactattttctatcaaaaaataatgtaagttaaggatcatcttttatttatactttattttatcttttagaaaaagttttatgacatgattaactaatgagtaagctacacacatattcttaattgtttccctcactctacttaatgaatgaactaagatagattttctcaacaactaccttgattttaatattttgttgatgcttaagattttgttgttgaataatagccaccacaatgctctatgcttgcacctagttctttttatttttttgcattataatattttaattttacatcgaattaatcttatttccaccttttatgcaaacttagttatttttggaagggcctataattgatgtagtgcctccttgtgagagaatatgattacattttcctttcataagaaagatcttattatgaaagatgtgtgaatatttaaactaagcagatcacaacatgaacaagtcatttgaaaacatgttgagggtgattgtaagtttgtaattgtcaattttcaaatgctaatttcaaaacaaaatatgttcaacaaaaaatggacctgaaatacttataactcaattttaaaattatttttcattcatatcaaaatcaagaaaaaccattttatgaatttgatttagctttaaaaaatatattatcaccaccatcatcatattaccattatcattatcgctagtataattatctcatttatctttattattatcatcactaaactctttcattaccaagtccatcaacactagcattgcaccaccatagtcgcaaacttcattttacctcctccattgtatcactcccccagttaattacttgcccaaaacaatactaaatccatgaatatagatgtttcttttcccgctttaaatggcgacattaatttatttgctcaataattgaaatgatgagaacacacaataaaatatagttgaccagctcatcctgctaagaaaaaaaaatgtttgacctcggtgccaactgctagtagggtacaagacaaattaaatactacataaaacataaaataaaatcagagtttctatctcgtgataaaggcatcacagccggagacggcaagttcagaaactttctttacattcggtccacacatgacacaccccacttgtgtattccaaaatttgagatttcatattcattttcaaaagtttttttataaaataattcttacattttcttttgcgcatgacctttttctctattaaaaatataaatatagtaatgaaataattattttatttatcagtttcccttataagaatactataaataaaatactcaaactttgtattgcatgcttaatgaatttggtagttttgacattgtacttggtgtcatgtcgataatgatgtgtagattttaaactttgacatagtcagcaagacaacaaccgcataagttaataaaatttctctttttcaaataatgagttttttaaaaacgctattttagtatagaacgacataccataaaagaaataaattcctactatcaaatatttataatagatgataaaaattttattaaataattaatgtgataaagattgcatttaatttatatccactatcgactatattggaatattaagataaatatatttttaaataattattataaaattaaataaatttatcatatgacagtttatatttaaaaaatatcattatcccattattataaggttgagttctaacaaaaaaagtagaatacaaacataaatatttatacatatttactaaaacttaaactgtaattagaaactaaaactatataattagatctataaaagaattatagaacttacaaattacagtcatcaagaaggtcggcgagttttgcggggccaagggctgaagaatataaaccgggttttgaaaacgggtcgggttccggataagactggcacgacccggaagtgtttttctgatcaattccaagcgtcgaaacgccgtcgcggtcaacattggtcaagcccaagagaacagcgtcggacatggcacccgtgttgggtatcaaaacgtcgtcgtcgtcgttttcggagggctcaatttccatgtcagggcaatcgggttcaccggccgagaccgtttcctcgtttttcggcgtgtcggaaactgacaacatgggagaaagctcggaatttgaagaacacgcgttttctctttttgggcaagtcacggattcattgggttcggataaacgggtcgtggatggtttggttctagtgcttcccgcgagggagttccgctgaacaggtttcgcgtgtttgtggtcgccggtgtaggtcacgatgaacgtgttgggttcggttgtgcttcgttctacttgctttctcgcgacgcagcctttgcagctactgcatctgtaatagttcctatagaaattacagttcaaagtaatgttgtggatttagtattctgaatgaatttctcgtgatgagagtgaaattcaatagtgtaatgttatggatatgttactgtgaaggtgatgagactatgagggaatgttttgcataattacatgtgcttgattatttatttatttaccttggatatggagagcctttgatgggtttttgcccatattttcgccatgcccacaagtctgatgacagattgtctgctgttacatggcacaccattttcttctgatggctttttctgtagaaaaaaaaaatggatattgatgtaaaatgtaggggttttatgtatgggaaaagttcgagttttttttgttaatgtaatgaaattgaataaagtgtgtttgtaaatgggaattgaagtgattatttacctttttcttgatctgggtgtttgtggttgtgtggttggtgaaaggatgggacttgtttggggtgcttgaaggggtggttggttttgttctgggctttggagttgctgttgttggtggtgttggaatctgtcaaaaccagtagtggtgggtgttccaatggaggtgtgatttgtgggagcaggaaggagatggtggtggtaaccttgctgttgtccaatgaatcccgcaacctcagaaaaagtggagttgggattgatgccaagaccactagtgatagtgctagtgctagaagtggtgctcgtggtgttggtggggttgaagtttattaccaattgttgatgttgaagctcttggaacccattcgttgttggttgcacaagattgggaaaagagaatgagccattttcttggctcaaatccaagcatgaggtagtgttgggggcgggggtgggtggggtttcagtgtttgtggtggcagtaaaggtagcagctttgcaacttctaactatggcaaagagatcccaatcttcatgagtcatttttgagagagaataattggtttgtaggtatatatatctagaaattcttgcagaagaaaatctcagttgtaattggtggagcttcagtttctgctatgcccgagcgatggagacaactggcagagagcaaattaagactgagacagagggtgagattagaggcacaaaggatggcgctgactttttggatgaaccaaaaaacttgtaagagagagagagagagaatgatgttgtggtggagcactgactcagttggccaattcttaattatttatactgggaaaaatgaacttctagtgagagagcattttgttttggtatatttaattccctctcttggatttaggagtttattgtttgagagattttaattttctgaaactaaaaaaggacaaaagcactttggttacctttttgattgactatgctattatgtcaaaggggggaccctacctaaggtggctgcaacgtaataaggacgatgattccgatgcttccttagttagatgcccttgttttgttgtgttagcccccacaagcatgttgcctgaaccatactcgtgttctgattggatagtgtgcgtaaaccaggaaacttatagcagtgttgcagtgtgacactgccatgtttctgtatggtttgccctacaaactggggcacactctacccctatgttgtgtttcgggttttgtgaacaaaatataaataaataaaacttaatactactaagcttaatttcttattttcgttcatccaattaattaatgtaaacatgaatttcattatattactttttacatcataaatgagattgtgtcaaaatatggaagagtatttaattttcctagaagtttggctatttaatgtcataaaaaatgtgtattttaaattttaagtcggtaacggtaacagatttttatattaaaatttttcattacggggtggaagattttattttggcatcattaccaaacaaatacctgaggtaaagtagtttaaattcatatacttggtaattttcttttattaatcttatcttatagaactagttgctaaacaataatgatgtaaagtaatataagtgtcacaaatctgcactatgttgcgtttgatattgaattatgaataaaagattaataattttttagagattacatgtatttttcatgatgatgcaaatgttcaaactaaaattattatctttcttttctataaatatatgaagatgataaaattttgtttgattattacagttatacttatatactcgatcgggactaaggagcctagattaggttttagtctagtttagaattaagcataattaaaaaaaaaaaaaacaagttgcacaaaccagaaaattgaataattaaaaaagccaacagataaaaataatcaggctgaataattaaaaaaaataggaattaaaaaaactgaagaaaaaaatattagaaatgtaattgttttttaggacgaaatcaaattatgttacacaacaaatagttaacacttgacagtcgaattattattgctttatgcttctttttctgtaacatatgaaacatatataattctgttttagcaactttgtggataaaaaggaaagttgttttgaatttgtagagagtattcgtgtgtattgaaaccaataatgcatgattgtcgatgacgacaacgtagtagaaagatataaacaaccttttcaagtgttctggttgaaaagaaattaatattgtttttaaaaggaaaatcaagctaaatctgggaaagaatcagactacttaagtggtttgtaatatacttttaacaaaagaatagaatcattctcataaatattttaatattcatcgtgcatggaataaagaagtaaaagcagaaaggtgggggataggggaggaattaaaagaacaatatacctccagaaacaaaaggggatacgcgtgcattgtgtcacgaaattttaaaaagaagagcccagaaaaaattaacttacattagcaaaaaatgtttgaatatcaataacgtcataacaattttaatgatttgtgttaatttaaaatgatttcatatttaaatttgatttacatttaaatagatgtcgtgttactaaattaaaaaatgtattgaatctaagtcaattccaaagtttaactgaagcaattaggtaggtgttgtttatgggtatttatttagagtttgacacaaaattaaattacgacatggatatgtggtgccgaaataaacactcattaagaagttcatatttcttaccaacgtgattttcctcatgagacttaagtggatgacttgggttacaaaaatgctaacaggtaggttcctttgggaaagaaaaaaaacaaaattcctcctccggatccgtatcaatgtcactagaaagcactatgggaatatgggttgacaatttttatggcatctttaatttgatgattttgagaggagttgatcaaacttttttatatatctatgtgatttacagggcatgcagaaagttcttcattgataaaggtaatgatttaaaaaaaagatattaaggacatgaagcagagttggtgcatcaaggaagctaactaaatgtgtaaaaagtgttgtgtaaatatatgcgaccaccactatcttatctgatgcaaacccattaacttatacccttaatcgtgggaggggtccaaaattcatttttgttgttgtagaagaatgagatatttcaaggatagttcttcattccatttgaatttggttggcttgccattggaatagcatacaaaacccggggctctctcactttatttcagtatcattctgtcttgtgacaattgacaaaacccacttgagtagtaaaagaattgaaaagtgattatgtatgattcagtagcttttcgttcaatccttcttaggttattgacttcaataaagtaagataaaatttgagtagtagtggaggataaaatcgtttgcatatttcgctgatatcacttaatttaatttataaaggatctttgatgtgtggtaagatgcataaaagtgtgatgcaaaaacaaaatgcataaaagaatatttgtgtacgtgtatattaatttgtaagtttgtatgcataacgtcatgcatttttcccacgtggttatgagattcagtacacttttaaagtgaatgtcctcttatgatactaatattagatattaatggttttaatggatacgcatagtgtaaaaatttacaatattgtttatttatcataaaaattaataaatttattgtaaaagataaattgtgatttaatatttttttctctttaattatatattatccccgtcaattatttcctccaaatccaagttaacccttgacattgtaaaagtatacattatttacttttttgagtcaccaattaattattattactatgctatttgtataaatttccttaaaaatatttataaaaataataaaattttaaaaaatctataaattaaaattatctaatctttaagttaatttatagaagttatatctcattttaaattatgtataaattaatattagcttatggaaggaatttattttattcttttctcaccttttattttcttgatgttcagccgggtaattttaacttatagaaaaatttatttcattttatttttacaatgatttgcattctacaatttataaccaacattaacgattgtgtttgttaatttaaaatgatttcattttaaaattaattagatttagatttaactagatgtcgtgttactgagaattaatataagttacattgaatctgagtcaatttcaaagtttaactgaaggaagaaagattgtataattaactttgtgtttggttcaagttcgacaagagtatatgagtatgttcaataggtttgagattcaaacataactaaatattcaaaactgaagcaaaaaatggtggttaacttaatataaaaattttatgtcaattaatctatactcgtcataagagttttagtttatcttttaatttggttattttacaatattaaaaaacagtaattattctttttttaataatctttatttaccattattcttatcatatctaacaatattttttaaaaacaaataatactacataagacgcagcaataagaatttagagatcaataaaatgtaatctatttatttagaaactacgtaccatccttcaacaaatactattccttgtactcctaagttataattaaccacatacataatagacatgacatgattatctgctagctatagcaaactatgttggcactctctcccaatcctcaccttctacttttactgaggaagagctgaaagatgaggaggaggttgcagactacgattgaacacaagagtggtaccctttgtacctaactcattttatttttattaacaaatgttagttgttaatattgctaccttaatcattaggagactctgaagatgcaccctttggtcttaaagtgtttgataagcaatagttgttgttcaaagaaggcaatggtgggctttaacgttatgaagatcgatgccctcataggtagatacaatattcttcttggtttctggctctggcggtttcaactttacacttgtagtttatttgagtttgcttttttaagagacaatttttagtttgagtttgcttttatagtgccttctgttcagaaccgattaagcagacaccaggaataaataatctacttaagctaaaatcacatgcaatttgattgaatcagagaaacgttgatttgtgttaggtaactaactccattagtagtttgttacagtaggttagttagtaatccgtttattagtcatatcagtgagttagtaatgtgagatagtttgaataaggcatgttgtctgaaaataaaaaatggggttgagagaggagggatcttaccagtttagaaaggtttcaggtttggattgttaagagagtgaggagagatcagtgtagacactgagcactcttgtgattcgtttcaggctgttactagaaagtagtacttgggaataatacacattttatcacttttcctcatccattttctctgctttcttaattccatcaattttgtgctcaatttgtctcaatcagtaccttaattgcatgaattagtgctcctgttaggagagaagagttagtgaatgtagggattactgtggttgttgttgtagatataaatacttcactatgttttctcttatcagaaaatcaacaccttccgttccatatcaacacaactcacaataagaaactattagtaaagcactggttatgattgataattaggatttcatgctactcctgaatttatgatatgtcacttatgttgacttctgctattaatttatttttctaagtaaacttgcattaattcttagtatctgttcaataccgattccatatttttcaagctgccggatttgatcttttgtttggtttggatcatgtaagcaaagttatcagaaccccagttgattgatggaaggctcgagtgcctataccatggatggcaattcaaaggtgaaggcaaatgtgtgaagatacttcaggttggttacattcatccttcactatagctagtaaatcaatgcaatgcaataatttcttctgatttagtgcaagactatcttaatgaataaatcatcaatttcatctttgaactattatcttctctaccaagtggtctctaaagtaatagaattatttaagtaatctttgaggtattgaatatccatcatattagtacccaagttgatgtttttcagtataattcaggaaccattttgaagatttttttaacattttagaagattagcatgatttctgatatttctaggactacttagcattcaagttattatttattttcttaaattttaaatgacaaatccttctcaagtttaatttttttgttcaaaacattcaccattgattattgttggggaaagatagaatgtgtcttatttgatgtgtatgcagacatgttcaaagaattctggaatatctagaaggatttttgtccaattttggtcattcagaatgcacagataatcagatttgatcctattttctttggccagaataaattgcatgtttactattgactaatttacctattaataacactattgaaattaatatattaacctatgaataattctttctggtgatggagttattgaacttgttaaaaagctgactaatatcctatacaatccagattttccagaggtggattttttaaaggaaaggtatatttattatacgttagtttaaaattataaactacaatgtattgtcaaattaataaataatgccttatactttggtttttattacagctatacttgagttaaaaattctaatttaacatcattacatagtgacatttcattgagatcaaattttactaaatctaaaatacgcaaactctcaagaggtgactagagtacaaggcaccattttcaatggttgtaagtaggtaggcttaaatatattttttatcaatataaattaatatttttttttgtttctgttcttgtaaaatattttttcgtcttagtcattaaaaaaaatatatttattttatttttcatctttaaagtattttatttagcgctttgatataaatatagaaaaccatgaccaataataaatatagataaaagtgatgacactttctttccccagaatcaagtttatgcatagttactaagcattatgtatcacagttttattaaacttcccaaagcaaaatcaaaacgggcatcagtgatgaattacatatataatcatttacaacattgatcgtaaataataatctaaagctttattcatccactttcggtatacaccgcaaatgaggttatttccagctccaacactaaataacatgagtgttaatagataacccgatattctgaaccttattcggagatcaataaatatccgcaacaacctgcaaatgaaaaattctgtgacaaaaaggttttagttggatcctactctaaactagcgaccagatcctggttttctcctcatactagaatagtaatttcccccatttgccacaaatagtggatccctatcttctactttgcactctttactgccaccatctgtcataatatctagttctgtcttctccaactctcttgtcaaatcgtccattgtcttctttaaattagctttgctcgtttggcctgcttcttctgtagagagaccaaccattgtaacttttggaagaatgggtcttggtttcatttcttccttatttacaccttttctagatgagcttgctttttcacgacactgtttcggccataggtgatgaaaccaattaccaaatggtagacttaagcttggactaggttgtttgattgcttcagtattaccatccaaactgcaattagaagagtctaagcattcagaaatttgcctatcatcttccactttagagttctcaaggcagctgcttgactctgtagctctcagaagagaagcttcacttctgcaggattacaaacacaatgttacaaaatacaaatcattgaatttctatagacaatacacactactcaagatatccaactttaaaagtgctattcaatattgtccaccatattatattaaaattgaaatataaagcatcaaacatttccaatggcttgagcttatttataaattaatctgatcatttgaaaagtttatttaagttgtcaaacaaagcttccaacacatatatactaacaaggtgagtcaactagttcaccaaaattagatcagagtttcacaagctattcgaatgctaacaaaattaaaattcatggaaaagaagtggagaatttagtaagtgtaacgactagagcattctaaacatacataattaggtaccttccacattatttcagatattcagaaaggtattacaacaaacaccagtacttaggctatggttgatggaaaaaaatgaatgtattgaaatagaatgacacttagttcaattgttaagattttttgaacttaaaaatacaatagaaatacaactgaatagaatcggttggaaaacattccatccaaattggagggagaggttttggatggaatgctttccaacagattatcgaaccaaagttatctgaattaacaaatattattcttgggcaaggtttgctggtatttttttcttaatgcatgaaaaacttgattaggagaccagtggactaaggtcaggggttaaaatttcacgagttgaaaatttcagtttcaaaggcttgaagcaacataacatataccttctctcaaatgagtcaaccatatatggaaattttggttgtatgcctgttgctttccgcaaccacctattacccagtaatactttgtcgacagtatactgaaactgaagccctgcagcttttgaaataacacttaatggtatactagggtggcccatttcgtctagcaattcctgaacctgtcaggaaaaatcaacaataaattatccaattattttagagaaataggactagagaatacagattatgttatgtaatatgtatacctctggttctgtagttcatcccttttaaacaaataaaataatgaaatgaaacatacagcacaccatttttattttcaggaactagttatatgagtcatctcaggccaagtttttttttatcaaatatacaaagatcatattgggtgcctttaattgttgagtttgagaccatcctgaataccattttgatattgacaagccttctatattgcatttcaagtactttcaaatttgtgttactgatagttttgcttgaatgcattgagaaagactggatttgaagtctggataaatataaaattttcagaagactgtctctagcatcagaagatcatctatgagatatcagaaaactcaatgcaaatatagactcgagacttaactaggatgtagttgtgcagtatctttccctctcacattaccaagtttaagctcgtaagcttctgaacacaaactcgtttaaaattatttcctgaacaaactgtcaaattattataaatcattttagaaaaactgttttgagcttaataacctctttttttcaaacaatacaatattttcaagtttgcatttgaataaagtattaagaaaattgtatattttcactagtaattcaatcccattttcttgtgattctcagaaccacttcattaatatcataaaacattatcatatcacttatttgtattttaaataaagacttaatgtcacttttgatccattatgttttgcaatggttttgctttggtacattaagtattaaaagttttattctggtactttatgttttcaaaatgtatcatgttggtccttttttaaaatttaaaagctaatagaacactaacgtttctgacggaatatagaaaaaaagactaaaatgatacatttcgaaaacataaagaatcaaaatgaaacttttaaaatttaacgttgtgaaacaactgcgaaacataatgaaccaaaaatgacattaaggcttaaataaattccaaattagtcataaatgattcatataaaaaacttcaacatgagattttttgcaatactactagaaaaggtaaagtttctttctctaccaggtacttcattaatctttcatgaacttgaaattgatcatacctctggaggctcccctaacctatcgctcatttcctcaatcacttctgcagctaagttgtcatcaaccacatcccgccgccgctgcatgtgtcgagtttggattaagttatggaaatgttgatcaacagcatcttcaagaatattatcaagcatgtttttatcaaagaagtagggagtgtacctgattgaacaaagagcaataatgtaagcataatatattcactttccatgctttggtagaaaatttactaccactactgaggatatgaaaaaccaaccaaaaaaatcacaaaagaaattatattaaaagttaaaactgtccctaaaattgcaaaagaaacaagattagagagattcctgttgaattactactctaaggaaaaagagagatacccatccatagaaaatccaaaataattatttgactgatattaaatttaaaatcaacaaaatataaaaatgttctgtgaaaaaaactataattcacgtgaaacaaggaagatgagcaacacacaccatttaataccatctgtagttgctattgcaatatctaagttctgggcaccaaacacaggcaccccatcaacctttttcttgtcaccatgctctgatattgtcttcagcagtttattggctgccttgacctggcgggaaagtatttattataaataagaaggcagtcaaatacaaccagaagatatgcaacaatgaaaaactaataatacctgcttctcatttggaacaaactggaacaagtgaggtttttcctgcatgatatgtaatgtacaatttataaataaattaagcaaaagatataaacgtaagaaagaatattaaaatatcaaattccataattggggacatccatctgcatgcattactttatctaaacaaccaaatcattatcaaagcacacagaaccatcaatgagcatacttaaatcagcacaactcatttaaattagcaattgaaaatgtaagcaataccttgaattgtttatatgctagatcaagacgaaaggcacccaccacgcaacttggaatattcagcttttcaacatatgaaactaataccattaaagagaataggtgaaaagtaattattgatcagatattagcattagccaaaagaataatgatagtagaataaattcatggacaagcagggaactaacatagataacttggattatgaataaaagtacaaaacatatactgtgttcaagtgaattttttttgtacagatcctgatcagatgcagtaggccagttaatttgaattgcaggtggctatttgtttggcaaaagcctattgggattcttggggcatatgctctgggtttatttgtccttccactttggaacagcttttgttggtttgctacaaaagtatggtaaaaatatggaagatgaaattttatggttagtatgcattatatgaggcgctttgatgcacttgattggacccatatgctaacatctttgaaggtgcccctttgccactggctattgtttttggcttttatttggtgtgcagcacatggcagctttaattttagttgcctttttctgaatatgcagagattgggcagccttgttgcatgcttgagtttatttttttccttatccttgtcgtatctacttttcttagttgtggaggatatcttattcacccctacctttaggttcctcatttcactctgtgaaatgtctttttctatttaaaatactaatgagcattcaaaggcaagcaaaattagttagccttggtataagttaaaggacacaaaaatgatatttagatactgtaaaaaacatacatgtcatcatcaagttttaaagaaaagactatataggaatattgatcaaagtaaccttgaagcaaatgataagacacaaatggattggtaaggctaaaacttacaagcatatataaggactagagaaaagcagaatatttatatagctaacctgcatcttctagatcaataaaaaagcgaaatacaggaccattcctctcactcttggtgatcggtgcaaatatttttttcagccactcaggggttctgcaggtgatagatagtaggtgaaaattcacattttcagaaaaaataaggccactaacagcttaatctatatgagtaacaatttcaatcaactatctttatcttaggtgtaaattccttgcaatgttcagaaactcacaagcttctttgaagcctgagcaagatgtctggtgtttggtaaactggtaagagattacctcacaggaatctcacataaactcttagcatctcactcggatactaagattactaagtgcaaccaaactcaaccatcaaatatggttgggtttggctaaataacttaattaatctctcattgaacaagtgacttcgtataaatactaatgtacaaattgtttttaaatcaaagagagaaaaaatgattaaactgttttgacacaagttgaatgctgttttcagttaatccaacgagcttgttgaaataagcttgtgcacatatcatagttccattttcattagcattcccaaatacttataaaaatatttgtatgttgtatcataagataaactcaaataagctgtaaataagttctttcaaatacttatacaaatccaagcatatagactgtttcaatatcaaaaaaaagttttctaattccattctatgttttcacctttaattataaaaatgccactttttcactttatttaatagagtaattatattcatgcattcactttctcttatatctcatttctacctcattttcttcctatctctctctctccttttgtcatcgctttttctctctatctttctttccccttcctaccaatcaaatccaccccaaaatggggtgaacttttatatttctcctgttgtatttaaaaacagaaaacagaagatatcgctgttgtaacaaaaattgaaaacacaagaattcaaaagaaaccaaaaaaaaaaaaagattacaattataatcccttaggaatagaagagcgatgaacctttccgaaatgaagggaatgccgaagtgcttggaagcggcaatgagccccgttccggagaggtcgcacaagctgaacacctcccccaagaagactggcccgccgccgccttttccattggcaccaagccgcgcgatgcggactgactttgctgggggatgggcgggcttggaagtggctgagtccacggtggaggaaccggagagcggaggcgcgaagaagagagggagggagacggaggtgggcgggtgcgggagagtcagggagggagggtttggggggttgaagagagaggcgaagttggaggcggtggattggaggaaggtggagatgtggttgtggttgtggcggcgacggcggtgaggctcggacggcagagccatgccacgggcattgacggatgaaggtttggattgagttgaactcatcttattttattgtagcaacaaatagttgtaatgttatcaaacccggattaacttgtgggcaattaattgatccgttatgatttaatatatattaaaaaattaatatatatatatatatatatatattattcgattaagaaaaatttatttattcttcaaaataatggttggagtattaaaaataataacaaaaatccataaataataatttaataacataattactaaagttcataaataagttttgaaataaaaacacaaataatatcaacatacaatattcataatgttgtaacctcaagtcataacaaacataaacaagattattaagcttttgatgctctaacctattcttttttctaaatggatgtgtttaaatacacttcaatttcttttacaacccaaaatattataaatttgacttaaaacacgaataattaatttttgtatagcactacaatccataacaatcctaccattgatctagaataatgcatataaagaaataaatcaatataatgaatatattatgtctcacaaaaacaaaacacaaatcattaacgttatcaaagtatcaaacactaaatttacttggcataattgtgtttcgttcatgtattgcagctcgtcttgcacaatctcctttagaaaagtttatatatccccatgccttcatttaatttatcttgcaactcaagatctctatgtgtatacctatcaacgagttccaaaatgtcagattgtgtgttcttatacttctcaagttcttcaacattgaatctacaagttggattcaactaataaccaactacatgtagatctttgcaaagctgtgaatcctaacacctatcaaggacctccaaataaggctccactttcctcttatttatctaaaacctcataactatctcctttctgaccttatatatagtctggtaaagaaaacccatgacagatttatcttcattgttaacaatacataacacacaaactaataatgactttgtaagcttcacaatatcaataaaattgtttccaaaaatcagagtccaagatttattccacaaattttgtagtcttggattctttggcataggttaagcctattgttagttgttattcatgagttagtttgatattgagaatgcacaaggaaatagtaatgtgtcacattccattgaagtattcaaattttgtaaacagtaaagtattcaaattttaattcaagcagtaaagtattcaaattttgtagtctcggattttgtattgtactcatatcgcattccattgaattctctctttaattattctgtttttaattcttttgctttttatttataatttactattattgccttttattttgtcttctactcttttcttttattattttttccttataaattgaaaagtatccaagatgagtataatacaaaatcattgtggattcgacactcggattttttaatactttattgcttgtgacaatttaatacacttgccaatgagttaacaattttttttgcagaaacttattaagttaaaaagcttttaatttaagtcttatataaagaacttgagagagtataaataagttaatctcatccttaaaagcttaacatacatttttttttacctttatttgtgttaagttatcacaaaatagatgcttaaacatgtccaccaaaaattatataaattatggtcaatattaaccaatttgttatgcatatgcatttaattataaagaaaacgtgttaaattagtagccttttaaatattcaatataaaaaatgttgaaaatcctatgtcaatgaaatttttagtaggattagttttctgttcttaatatatttaaattttcttgtaaaattgggctaccatcttgaacttaaaagacgagggtatgagtgtggatgtagaaatgatcatggatgtaaaaatataggctaaactaaaaatgagtaagcctaacattgttcataagaaatctcattaaatacccacatcctttctttcagcatgaaaatttttgggtagatgaaatggccatcaccagattctcaatctcacattttgtgaaatttttaagaacatgttcttctagtcctattcctagagtgtcttcactcttatctcctaacaacttgtaggagatgcacatggaaataatgattccaactatgattaacaataactgccaacagaaagtcatctgatagagaggttatatcatctttctttcattatacattgaaaataggttccatactgtcatatgaatcatctgaaatttgttcaagttccatggatattacatctgcttcctgtccaagttgctgatcatcaatcatgtctgaagtctcttcagatctataattgttgtttatgcctgaaatttgttcaggtttcatggatattacattcgcatcctgtctgagttgttgatcgactatctctgaagtcttttcagataatctataattcttgtttaagtctgagtttggttcaacattcccatgcctttctatgtatgtgttgacctgattagactgaacttccactttgacttttacacgctttcctctgatgtatctgtattcccattgtggtggtggatattttgcatgtaacttctggtatttgtctagcatacccagctctttgaaggcatccccaatcatcgagacaacagcaatattaggtcgaagacaaagctcctccatgtcggcaaatatctacaggagaaatcaagaagtgaatatccatgatatgttaagtctgaagtaacttcaaataaagtataatctagtcatattaatacagggacatgttaagtagacaactactactcagtaatgttaccgagtaaatattttaaattgatatcgagttgcaaatcataatacctcaaacatcttctcatgcatgcccctcttatggtagatagatatcattttatcaaaaaatctacgaggcaagctttccatgtactgcattaataacttcgtccaaagctcttcagcttcatcaagacggtcatcctctactaaagcattaagtaatgtgaaatagcttcccattgtcttcccttgacctttgcttagcatccactttgttacctacagtgccatttgtaatttgcataaatggatgttagttcacaggctatccccatgaagagtagggatacaaataggggagaatagggaaacaataataaataaataaaatcagaaaaaaatactaaatttggactgaacaatgaacatctatctttagagatatcaaagcaatgggccaatgaaactttggagaaagatacgaagtaaaaaaataaagaacattaaaaatattgtgttacattactgattttgaagtacctgtattacccgcttccattcttgttcggattctagggtcttgagagcctttttcactgtaattaaagggaactctaattcccaagcaacataggaatcaagagctccataaacttcctctttgacatttgacagctccttaatctgtagaagacattagaaaaattacttttctagaaatgcaaaacacccaagaaaaaatcagtccgaaagtttctgaattaaatgagaatgtcacaacttcccagagagaaaacaaaattgaagcttaaattaatgtcaggaacgactagagggaatgcaatgaggaaaaacttacagagttaacaagcttggcagccttggaaatggtcccaatttttttatgggtcttccaaactcggggatatcttggtctttgaccttttgcagcacataactgacattagaaaatgaaattcagacaagttctccgacagtttcatttcctagagctaaaacatttgatgtttaaagtattccattctgaaaattttggttttcaaaaactaataaacataggcctaaggatcttaccacagtgcctcgtgtacttgttggtattttaattgcttcaaatgttttagcaataagtagaggagaatctgtcagcgcaagcatcttgaggacctgaacaactctaaaatagaagacaaaacatcacgaggacatgaacaattactaggacatcaacaattacctttttaacatactttaacttcttataaaaaatttttgaatgcctgtttggtcttggtggaaatcttttttgcaataacaacaaatactaaagcgaaaacgctttcataataatcatcatgaagataagagcaatttagctagttgcagattccaaattttgtaagagtgtcagtgtcagtgtcaatatgggaaacagattcgatgcaactaggacgacatagcctatggcttcatagtcagtccccagcccaagcaaaggaggaggattgtgttatgcactcgacaaccaaagtaaaacccaccgatatactgaacatgaatcactcacaataaaatacggatgcatcactaactttagaatatcagtgcattagacagagtttcaaacaagaataaagaaatcttatcaataccgcaagggaagcttaaagcaggaagaaaagggtaaccattcaaaatactactaaattgccacattctcatttcatgtagtaaaacaaacacaagaaatattaaaaaagtgttttatttttttctctctctaaaatccatccctcagtatcgtttacagtacacaataggaacatctttcttctataaagttataaactacatcattttattttacacaataaaaactgctactgagttttcaaattgacgattgataagctaacaggtgaaacaaattcaatgaaaaccctcataaaataaacccactcaaccgtcatccattacagtgggcaaatacactgaaattgaaattatggaaaagaaaaagaaagagaaaaactcaccacgcacggcttaagaacaattgagctcagtgttgtgaactcgaaactcagcgttttgaactctcacccttttccaccatttcagagaaagaaacaggtgttgaataaactctaagcgcagagcacgaacgtgaaaattgaaataccgctaaggaggatattttatttctcgacgcgaaacgacggcgttctgtcactgtagggtagggctgtggtgtcacgtgtctgtaactcgggtcgggagaattcgaacaaagcggaacggagcacgtgatcctctggatagggtcattttcggtatttaacccgaaccggttcagctaataaaaaaacgggttggaccctattctgaacgagagcatgtttgttttcttgttaaaaccttgattgcacgaagtttaatgcgtctaaacgctcatttgtgcattttgaggcaccaaaaacaaaaataattattcttttgttacttttgaaagaacaaacatggcctcagtcatgcatgtacttgacatagccacacatagatcatatttaaaaatatataaagtaattttaaaacaaatatttttaaataaatagataggattttttttattaaaataaataaaaaaatttattttaaataaaaataattttgacaaagacactaaaaatacagaaatttacttattttattagatacatatttttaaataaataaatttaaacaaattaatccatagattctctcttttacttttaattttttgattgcaagaaatcttgtataaaaatgataaatattaaatattcttgaccttgcattccttcatgctcatcgaactctctttaatccccgacccgaaacacccgacccgataattttgaagcgaaaggaatcaaataggatattttttggttcatggaatcaaataggataaagccgtcaaaataagacccaagagcaggcgtagaaagtttacgatggtttcgtccgtaggcgatcagcagggacaatagccaatccaaaaacaaagcctctatcttctcatacctcaaagcactaagaatctctcatgatattattctctgccaaccaaaataaccaaaccaatcaataatacatcatgatcataatcgaagctcccatcgccgtcagattccacgccaccgccgccattcgctccgccgccgcaccttcacctcgtactctctctctcacttctcttttttttttcttcttccatttactttcgctgactcggcttagctttgattctgacttacggaatgtgatgttgtgagaagtttcggagattgtttcgaaacaaaaaacggcggcgttttgcagtgttcgaatggactaacagtagttgttgttgtgcattcgttcattgactagtctgcactttttggcagataataaccgttcaatgtggagcgccgatgacgtgaacggtgtgcgttatgccgcttcgtgcaggctcgcatgcagctgcggtttcgacgcgccttggtatgcccgttttgctgtattcatgctcatgtgattatttattatgacataaagaagtgtgtttgatgattatggaaagaaattgtggaaaatttattgtgttacgatcgcaaaaattataaaaatactagtactgcctccaattcatattgacgttgaaggttttttgacataggagtagtatttaatattttataagggggcaattttactgaaaatttcttactttttataaatgcatcactaagtattactacaagacaatagtaatgcttgagtgaatgaatgaggactggtgtaatgtgatgtaatcttttggtttttgatgaattctttggtagggtataatagatagggtttactatgcattcgaaccaatagttgacacatgaaaatgataatgaatggacaaatgtgttgtgttaatggtgcccatctaagaattagtcttgttttccaacttttatggggattgaaaaattctttacttccacatttggttccgaatgatatgtcaactattaatatttcagttggaagcacagttggtccattaatgtaaaggaagataaaatatagttttcatgagaaagctaatataaactgttgttattggacctgtttgtagagagctgatgggtgcatgcatgtcttgaatcaatgtaagatgcagttccctaaaacagcatactttcaaaatttatatttttctttaatctgacagacttcttctggctaagtgtgtcgatgaattcagaaaatgtaaattttgtaatgtcttgttttacctgtaatgcttattttgaaaattttggctacctttcatgtctagaaagattaaatgttgttagaggaaatatataatggatgaatataattacacagggtaagaagtaaaataaattcaggcactccgttcacaagaagaaacaaacttgtaaaaaatagaattagggcatcatcagagcatctgggctccgctcaggatcctctaaagaaaaatgagaagccatcctatcatccatttgaagaagttgccgtgtcaacatcagagaatagtgaagatgctacacttactgcagcagaaacaagtagaacaattattgaggtactcagttgtattaattttgctaatcaatgatgtaatgtaacctcacagaacgaggaaattttttttggcaaacatttaggttttctcattttagtgctatatttttacaacagagagaaagaagagcttactgtttggattaaatgattgctagagaatatcctatgttccaaaatctgcaatgttcttatatgaagaaattaatgatggtaaatatagatgtaaaaacaaatatccagtgtttccatttcacttcagaaaagtgttctgttctcttcttgtttaaaattgatttagcatgacttgtttagttgtttttcaaaatgtatacaaaatataaaattaaggaagatatggttgatttttttgttgttttttgttgaggaattacccactctgtgcttagatgcaatcagctttggtaatgtcaatatatatcatgtcggctgatatatatttaattaccttagcaggtttgtggtcagtaagtttgggatgtttatatgtaagtacctctggtccttttatatttatataatacatacatagttttgttcataaaaaaaaataaaaattaaggaagacaattttttttaggtttacggttcagtgtgtagttacctaccatataataagagaataaattatcttgtgatgtatcattctttgttttcggacccaagtgttaatttaaccttcggagagaactgctccataattttcctttgcctgtgtttgttttgacatatggtgcagaagttgacaaggtttcttgcaatcctacggaagaatagctggaaatttttgttacgaaaaaatatttaaaatttgttgggatttgccaagtgtaagtcaaaatgatccactaagtttcttttaaaaaattatcgaagttatataactttaataacggaattatggtctcattctagtaataagcattgaactcatcattcctgaatttatattcatctttgaaaacttaatgccaaaaatatcttaatattctgttatattaaattctttaattatagaacaaactgtttggtagtacttatgtgttatcttaagttttaacagactgtgagccttggatcctttatccacaggcttaactcatgtaatgaaaactgtgaacttgagagggaagattatatcaagcagcttatcagttgcatttattcttatcattgcaactacgaatgctagctaatgaggattgtggtatatcatttttaggttaacagcaaagcaactctgatgttctcaagtttgattagtgatgagtttcatgaaaatattatttggccagatttgccttatttgactgatgaacatggaagtaagtgaaggctatatgattgtcatttattatgtattaattttcttgtgcttgggaaggttcatccacttaattaaattctataagcattgcagatatatactttcaagtgaagaacggtgaagatattttgcaatccctaacttccgaaaataattttgtggtatggccatgtctaacatttaactttaagtcgtctgacatgcagtttatgcaggcatccatttagtggaaagcttcattttacttaaacttgatgacctgatctttacgaatgtctttttatgtactagacattaccaagatttccttcattttctccgtggtcgttctgttgacatcattgaaaatgtaatttgtgaacttttgggcttcaacaatctttttatattctcactatttgcttgctgtgtctcattatactatttgaagcataaactatcaatccttatgcatcatttgtgtgctacttattcagctcaactttcatctttcattctagtctccagttctgttgcataatggcatattttgtctcatgatatgtaataatgtttgctttatgggttgtctgttctgtattttgtagcaagtcattgttggtattaactccatggaaatgatctccgagatggacttatctggtccttcagaaattgactttgggatagaagaaattgatgatgaagataccgaggatgtagatgacaacaatgaagatgaagacaaagatgaagatgagaatgaagattatgattcagtcagttttttttatatcattctgaagcttatattcatttctgaactataaacatcattagtacaaaagattattcattatttctatattattgtttgcaggaatgggtggctgtgttttcagatgatgatgagcaagaagacgatgatgaaacacttgcagactgggcaaaattggagactatgcgatcttctcatccggtgtactttgccaaaaagttagctgaggtagatattaatgtcaacatgttgattatacgaatgcatttggaatgacctaatttgtggcttcgagagacctcattctaaatcctttctattgcaaatttccctaggtatatggtatcagttgacttccttcttcttcttcttcttcttattattattattattgtagattgcttcagatgatcctgttgattggatggagcagcctccagcttgtgtggctatccaaggggttataagacctgcttttgttgatgaacattctacaatacagaagcatctatctgccaatcaatccagtgatactgacaaaagtaaatctatagaaagtaaaggggaaaatattggtgtgattaatggtcatgtgcttaattcagaatcttctggagataatgcggcccagcaggttgaaaacaacgggaatagtgtcatcccctttagcgagacttcattttacaaattggtgatgattaagattcaagtgttttctgcacaagggcaacctgtaagtttgctgacttataagtgtttgtgtgattgtttagagacaaccactatgaactcatgcaaatattcatgcaccttgctcatattcactattgctggttaccttgcaatttgctaacttaaccaattaagttaagtaataatggatacttcattgaaaaaggtaaaataaagctaaaagccatgacatgattcctacattaatttataaatacctgaaatttggcacaaggggtattttttcctggaacaacttcagtactaaaagaggtgtctcatcagaaagtattaatttgtacttatactttctagtctctagataatgcatggcagaataactctataattgatggaggcatggatcagataaaaaaaaaacctagataatatcaagatatatctatcagagttcgctgccccatgttctatagtgttaagttatgaaattgtaatttttctaatttgtaactatattggttagaaacttagaattgttaaacaaatagtgacatagataatttgattgccctaattagtggaaaacaaaaatcctatttgatggcttagtggaagaaataattcgtaaaagtttaaatatgcataatctaagaaaattgcagtgtgatatgttagagtatatgacatttaaactttttttggttgaaaagtaaatttttgttctgattctttgcagactgccattgaattagaagactacatgaatgcccaacctgatgttattgcacactctgcttccaaaatcatatctcgtttgaaagctgatggagaagagaccttggaagcccttaagtccctgtgttggagatgcaagggtattcaagtggaggtaatacataaactcttgtaataatttcatcagagcacttctgttaggcagttttctctaactcttgcttgccatttgccaattcgatgaatggttttgtaaacaattttagcatgtttgggttagtctttgatatttcgtattcaattcaacaagaacgtgaagtttatgcatctcttttagaaatggtggtagtgcaccacactctttataattgagaaacagtgactaaggacatctatgtttcttgaaaaaaaatgatgataaaccatttgggaaaccttatcatctgtttcattttctcaagagtgcttgtgtacaagcatatgcgcattcacatatgttacagtcaataatcacttttattataatttattgcaggaggcacaacttatctgtctagactcccttggttttgatctaagagtttgttctggaactcagattcaaacactgagatttacattcaagaacagggtacattacatcagttgtttttcatagctataaatttcatattagttctgttatgtattgtacctccaaacactaacaaaatcaagccatgtggaaaaacttttcagagtagtacaggctagtttgaggaggggagggggttgtcaccttttcatgaaataatatagtttttaaatggatcctttatatttagattttgggccttcctacttttttagcttgacaaacaccacttaactcctctacacacaggttggcattgtattgtgtccaatgtgctaaaattttggccttctggcaacttgtctcctgattataaaagcagtcctatgtatatttgtttgggggtttacactgtcctatatatcttattcccagtcatttgcacttattaaatttacatttgcaggccacttccgagtacagtgctgagagacaactcaacgatatactatttccaagaattcacccaaagcagcaaaaaatgaagcaaacacatcaaaatgaatgctaaaatcatctgagtgtcatcatacatgaatttttgtattgcttgtatgcctttggccaatgattgtttataaaagtgaaaggcaggggaaaagatcccatgcacatggcaatcaggttatgaagttggaattgcatttaatcattagtttagttggaagtaattttttccccagttgcttccttattcttgactcctgacttatctatgcttttgtatttatccttttttcttgattaatttaaaacctgcaagtacaagcaactggatgcattagacacggggaatggatgaatataaaaggccccaaatacagacttttaaaatcccatgacttaattgggtgctatggtcaattcagtggcaccatggaacccaaagtttgcccagttgtcgaactaatgtttctagtgtcactttacagctggtaagttgaatgcttagttatgatggaattgcctgtagaattaggaggaaaaggagatcctcatgctaagaattagtgtagcttatggagttgaatatctgtgcattacttgatttgaagaggaagactacttcaacatctcctatggtcaagttgttgtccaaggctcaacaaaaaagcttctaaaacttaacgatgattgatgtaggttaaataaaaaagataaaggtggctcaaagatgccatcagtttatatcttgaaggtagattgagtgccatgtatagtgaacagattgtacaagttagtgatgatttcttggattagagtatgccattaaagaatatgtagatggtttcaacactgatatttcaggtgtcattattctatcgaggatggatattttcaaggagataatatgtagatggaattggtgcttttctgattcaacttgagtcatcaaattacatttgaaatcatcttgaacatgattcttatttttttctctaaatttatgaccttttttataatcaaaatatgcttattttacaacctacctaaacacctacactgttacaaaaggtaaatttggaccttttctatatatcaaaaaaagaaaaagaattggacgatatctcaatttcatagtaaaaaaaattaagcaactcatacttttataattttttatttgtacttaattttgtttcaaattaaaatatttttaaacaaccttatcctatagaatatgcagaacttatttctaataaaccctccatgttatatagacatcctctaatgaaaagaaaaattaacatattgtatcttagaataagatactcatgaaaatacttgtattaaagatgctttaatcttctctatatcgttccaatttgatatatttatttaccaacatgcaattaatagctttctttttaaatttgatttaccttattcaaatttgagtcagacaatcactaaaggcaatagaagtataaagcgtaattaaattttaacacaactgcaatctcttgaggcttgattcaaattccaaaccaaaagaacaattcactggtaaggtaggtatccgttcagtggtagatcaattattttcaaataatgtcaaatttcaaaaatcctttttacagtatttcccaaacatgcgttgagaataacttacatagcaaatggatagagaagacataaaataaaataacttacatgttcactaattttacatggaccggttcggcctgatataatgcgggccttaaaatgttagcccaacccaaaagtcgtactagatgaattcattcacttctttgttaaactatgttcctctttggttcaaagttagaaaaataattcttacatttttcaatataaatatatgatttaaactaacttttaaaaaacacatgttagccgtagcctcagattaaccaaattaagaaaaaaaaattaatatcaggaaccattagatatctatatattttttctcaacaattcctcgtataattaataaaagaattctaaaaatgatccaaattaagattagtcatccaaagaattgaaacttataagaatattttgagttttactagaaaatcaaaagttgtctaattacagtgcttacaaaataaaatccaaagataagatggagatgttttgactaaattatgataatcaattatcataatcctactgtacatctataaaattgaactgttaaaatgcaatgacgatatagagaatttttaaaccattatttatttagtcatgtgtattatttttgtttttcatgtgtatttttcttgataataatcttattcgagatacgattaaacactgaaagtaaatatttctattagtttgattcactacattattgaaggttaactccttttgttaaaatcgattcccattagttcttcaattacttattatgatataccataagtttattaaattttgtattatttattttaaaaaggtatacctaaaatgttttttgattggtttagtaatataaaaatatttactaacagcgtaaattaaactcgacaaatttataaatctatttgaatttacacatttatcatcatcctcttaaataaaaataaagaggcaaatgtcatgatgctcctcttaagaaaacgatgtcataatacttgataaaattacatggacataaaaaataggacaaattcttaaggagaaacaggggaggtgacttttttgcttaaggagaaacgggtgaaacatatgtaggagttaaaaagcaaactcgagatgcatctgaacttctccgtttttgacgagagcttgaaacccttgtggaggaccctgatgaccctcttcttgcatgttgcagtttgattctgatactgaaacaagatattgaataatcaatcaatcaatcaataaagtacaaactttgatggggtccaatgtgtctatggagttaagagtatagagaaactgtactcacttttgatggacatcaacatattgatcagtttcatccaatatatcttccttgaataatgaaaacaactaaaatattagcaatcttacaacaccggaatcaaaagaaaaaaaaaacactagttgagtaattcatctttatgtttaacattattacgttcatagtgaattataaattactaaatgttttacatggaatggatgtgtatgattcattgatgaatgtagaccagcaactaagttatcttgtgatttagtgagggatgtttttttttttttaagtttttaacaacatagctatgtaactataatagtgagtaacattaacctgaagtaactcttccataacatcttccaatgtgattatcccaatcacttcctcatccgctgttggaagagactccaaattctcaaaggatgaacttgcatcaggttgttctgatcttctttgcagaagatctgagtcaccctcgcgatgcatgatgctcttcagtgttgcactataatattctgtttcttgtgaatgccaattggatgcatcggttgagatgcgaatataatctcccagttcaactgaagagcaatgtcctataaaaagtccacagctacaaccttagatgcttgcaagaaccaactatcataaaagcttaagctattcatgtaagagtcctttgggctcaaagagtggattaacacatagtagcacataccaaattttatttagaatgtaaatgcttttgtgtgtttttgtttctacgtttcatctatgagatgtgcattacaacagaagcaattatttgtagcttctgtaattttaaacatcaaatgtgtgtatttgatgtagaaccaaacacacactttatatctaacaaattccaagacaaacattgtaatctgaaaagtttttgcttgagcaaaaaatgtgaaagctgatgcatcatatactcaaacttccaatgggagctgtgcttggcttcttgatgatattggtttttgaatgagaatatttgtgtagaaccagacctggagttttgctttcggtatgagttgctacagttctgatgttctctccacacttgaggacaacagccatgtggctttgaccattcttgaattgattcaagatatcatatagtggccaatcttcaccaactctgataaccaaagagatcataagctaaatacagataactactgagattaatcagtcagttcttagcatatgatcattatggtatagttatgttggttttttggtttctttctttgtttttcatgtttgccttcactttcaccatcatcagctttgtcatctcttatatatttactttttccattcaaagctactctatcatcagcaaaaatagggaaagaagctccatacctgggaactctcctgatagtcatatatttaattggtgtttcatcttcaggatgacagaagattaaattcttgacctaaatcaaggttggacagacagttctgttatatacaccaagaagtaaggtttgattataattcagaaacttttagcaaagcctttctgttttttcatttgaaaaatgtaggtacttgaagggactttcaagtgctatgtaaaaccatacaatatcattgaaattactgtacttatattggataaacattttgcacattagaagaaaatgtctcgatgtttcaataaaataaagtccttagaaaattatccaaatagaatttgctataaacaagaacatatcaaattgattgattaccaagataataccaacaacatttgtctgttttccagagtagactggtattcggctgtgacctttgctcattattaagcccattgtatgcctataattaagaaaaatgaagtttaggaatagtaaagtatgcttaaacatcagatatagagatgaggggcatacatgtccagtttggagtttatgtcaagagaaaatgtttcacttatcggtgtcatagcatctttagcagtcttctgtgtcaagtccaaagctccagcaattattgtagtttcatgaagtgacaactctccacctttccctgcctgataatgaacttgagcatatcataataaaatgttacttaaattcttgaaccgataaaatcaactaacctcattagcatgtaaatggactaaagtcttcagctctgctcgtcctaaaagagcagtatgccccttgccaaaaatccaatccaacaactaccatagcaggattttccaacatataaatcagaaaaataaaatattaaaagctaacatttaggctaggtgtctctggtttatcttgttacctataactagcggaaagacagacactgatgagcctatctgtctgcatttttttattttttgaagttggatttgttacatatgtaggtagtgcaatttttttgtatctatgtaattcacatgagaggttgaaataaaataataagattgaagggtaaaaaaaaatttaaccaaagaaggatatccccttcattattgttatatatattgcctgactatcctatcaatgatcctgataatgtagatcacaaattaaaagtcctgatttattcacatcctaattttgatgttgtatgcaatgagaaaagcatgatatcaataatttttgggaataggttgtctagtaattcaacaaaggttgtccatttcattaaaggttctaattttgtgcctctgattctaagatatggccaagttagtgagacaacttgtttcagtaaagatagaattaccttactaagtggatatgcaattgggaagaaaaccatcataagaactcgaacaaagggagacaatgttgccccaacacttaaaccatatcgagaacacaaggctagagggataatctgtgatcaaagtcttggatgagaaattaaataaaggacataaacataaatgtatgcatgtaattaaatacattcacggtaaagttcattttgctatacctctgcaatggtagccaaaatggtggctgctaataatactgaaagccattctgggaacattttctccataaaaacagaaaccccctcgaataacacaaattttattgtcagtagtgttcaagtgttcaaccatatagcattacaaaatgtgtgtataggcactaggcaggttattggatcctcaacgggcataccctttttcttagtaattgtaaatcaataaaaacactcaggtattttagagcaatcatgccaaagatatctttggatttggagtaatatatggtcacaaagataaacttgaggtgttcatttagtatacagaaatttactttaaatcagatgaaagttcttgaaatgatctgtgtaacatacctccagtgccattgatttagctatgaggagggtgcataaaagtaaatgctcattctttgcaatggacataatcttcgctgcagataaatgaaattgttttcatcacttaataagatgaatcagtaaatagttcatatatagtttcataccccaaattttctcttcaacaatagcgtctaattaagtgtaacattgtgtttttatttagatatttgcccacttatcataaatgtaagtttgtattgtacttgttgtgactaagctgataataagaatttatttttctctgctttttcctcaatattagtgtaaattaaatgtttaacattgtgtttttggttagatgtgtgttttatttatgatgtcatatgatggcttcatatgtacatggctaaatcttttatttttaactaacttggtgtacccgaatatgtacatggctaaatcttttattttctcgagtctaatggtactcttaaatgaagaaaattatctaaacaaaacgaaatcaactacctgcattcttctggatttttggctgcccagctttaacaaaaacctcaagatcaacctggctgaaggacaagagtcctagagcaagacctgatgtgatagcagcaaataacacagatgcccaacacatgcttagtaaaatccaaaagtgacttccacaacaaggtgccctttcctcaaaatatgaactcatttttctttggatggggggaagtgggagaagcaaaagaaaaagtcaatgacaagaattgcaacatggcatgttacaaagcagactataggcaaaactcaagtatataactctctgcatgatgtcattgcctgcatccttaaatatatataagtggggtgccccaccattaggatcaaaggccccaaatcataaattcctaactcttcggagatttctgagaggcaaagtcaactgacacaacataattaagtagaaaggtgtatactatttttttaaaatttgacacagatttctaagagatattcaatttgacccataaaagtgctgtccaataattttttttttcagtatctagtaaagtgctgtccaatacaattgagaagattaaacatatataccattcagattgcgctatttaaagttataatttagggtgtttgatagaaaattataatttaatttttaaacttttaaaagtatgtatttaagtaattatttaatttttcattgtatagttttgtttttcaaagttacatcagtaataaattgaactgtctttttttaaaaaatgtgacagaaaacaaattgaatttttctttttgtatgcatggtatgattcgttggttgacttgaagagtggctcaatagttaactcgttctattaagactcaaaagtttatggtgaaggtaacgtactcttgtggcacgtattggttatctgcatggggaagtttatatgcctaacaaactaattcgattattcctttcattgttttgtacaactattttttttttaaaagaaacatgccaaatgtattagaaaaagattggtcaatggttctacaatctgcatgctacattaggactaccccgccaaggttgtccagacaaaggaattatgttgtcattcatcatgccttaatacaaggctttagcaacattaatgaggaatagatcctctctaatgatgaatagatactctccggtggcattattattattgcatgagattttcacccttcaataaattttattaacatattgtataatatatttcgattgtaaaacaataaattaataatgaagttgtgacacttggctattttggattttttttctcacttgaaaattttggcgaagagattctatttggtgggaaaaaaattaagttgattaagtgccacgatctcatcatttatcttttctaaacctccattttataatagaaatatattattttattgaaaaaaaattcatgcagtagtaatgttatggaagagtatttactctccattagaaatgggattctctcaattgagaaaaaaaattgagatggacaagtgtcacgagctcaccattaatttttttaatacctttattttacaatagaaatacattatattaatgaagtttattgatgggtcaagatgtaatgtaattacattagtaatgttattatagaggatctatttgtcatttggagaggagagaatttctctcctgaaaaaaaaatgagatgatcaaattttatgatcttaccatttattttttaaacctctattttgtaataaaaatatattatattaataaaatttattaaaagatctcatgcaaagaggatcgacactattattacatgagatctcggcccttcaataaattttattaatatattattattattattattattattattattattattattattgtaaaatagaggtttaaaaaaaataacgaggcataattaatacttgatcatctcagatttttttggtctatgaagacttcaaagttctcattaatgattttattttttaatgttctgtgatattgcagttgatcacaataattgcattttggttcaaagaggaatactagggcattctttataaaacttttttattggattgcatgttactctttacaacacattatttgcaaagcaagtgtgggacgtcacccaaatagtgttaaaatattagtgtttaaggtagtgtgcttttaatattctttttaaagtaatgctattattatcaaaatatcaatataaaaagaaatatgttaaaaagtatgcaacatgactcaataaaacagagtgttaaaaaattcaaaaacaaaaatgttgactatatattcctgttaaagtaatcatgttacaattcttaaaattaaaaataagaaacgttgtcccgttgcttaatcattttaggtgcaaatataatcagcatttatgcaaaattgaactataatagctataggctatagatcagttgacaatgaaacctcaaattctgtagcaaaattctgcttgttgatttggcacccttccaaacagtgaaaaataaataaaaattagcaaagatacatacacacattagtgccttggacttgccaacaccactagtatacaattaatgcacagacattatacaatattgcatgacagaatgtgtctaaactgaacttttacaagcaaacaaaatcaaaaaagaaacatatatgacaattaaaaaaagagctaagtaaccaaataagaagagagtagagacagaaagaaagagtgaaaacgggttgttaatctttttcatacattgtagtactacatgtcaaccactaatgcatcaatcttggaggaatcacaagcactcctaccactgctggaaaggctccactgatcagacactatgcttgctgcagcagatacaggtaaaatgccacctgcagcaacaccacatttggctacaatcctgacactctctatcaactccttggttctagcctcttgtgacaaaatgtccatcaactgttgaggagttatcacaagcttcactttccagaacctgctgcttttactactactagtaattttgctccttttactactagtagtaattttgctccttttaatagtactagtcctacaagagaaaggttctgtggaggttttgttgagaaacctcattccttgatggtgttggtagtccaaggacattctatatgggggagggtagggtgttgtaggaacactatgagatcgaacatggcctagccgaatggctcggttgtcgccaccgatgtggccggaggcagaagggtgttcaggttggttgttaagtggcagtaagtagtatgactgtcctgccaccaactcatcaaattggctaagtggtttgcaaaataggtcatggcttaggaatatgccatgccccgggaactcgctagtgatgaaactcacagtaataggagcatagaattccatgatgccaccattagatgttgtgactttgattattgtatcaggatctgacatgccccccaacaagcagtttcccatgttggacttgtaacctttatgaactgtgaagtaatagtgatggtcttgttctttgaaggtatatatggtaactagtttgctgctttggagggtattcaagagcgggaaacttgtgttgtggggatgaaaagaaaaaagatgttctgtgttggatacttcttggggggaaattctgatgaagaatatttagagtaatacaataacaacacccttaggctattataaagttaatgttgatattcaggtttggtgtcacatgttatgttttaagagctcataaaagctcttctttctcttgtttggcaaattaaattcggcaaaagcagcgttggaaaagaaaaaaaaaatgtacttcaccaagttgtgcacagcttatttctgctcgttcaacatttgttgcaaaacatactcaccagtcgaaagatgaacaaatgattcatatgtttagttttcaccaaatccttgaataaaatcgagcaaaaatgttgttcaaaattcattttggtcccactatccaataggcccagcagaagggaagaaagcaaaaggacttgtagatataccagccagttcttcgccctttttctttttcttttgacactttatctttcccctttgataaaggcatcaaggtgtcaagaaattgtatattcatccagttatttagctattggaaagtaaaatcactatcccctaaaatgtcacgaagaatagtttgtttgcttgctttggattttgtttcaccaattttattcaattattgtgggatttcaagctcacgtcacaaccgcaataatttactttaacagttgcatcggacttggagctaatattttgctttgcatttcaaaatcatttttcactagagaaaggttggcctgaaccgactcaaatgtaaaaactcagaatcataccatgtggaaagttctactgcgattgaaaaatatattaatgaaaattttctagtgtttaaccttcaacccaagactataagcaaggtggacttaaaggaaatgtcaccttagcaagagatatggtcaatatatagtgagaataactatcacttcacaagttatttttttttttattgaattaggtctaagttcaaatttagtataaccccccacatggcaatctattctagtaattattgatatgatccattggattattattgttattcaccattcatagatctctttgtaaacttcacaccaaaatgttcttcattataaaggaagtgtgttgacggttgaagatctcacatggattcaataatgatatgattaaaataattataagcaagaatcaaaccttatcccataagataacttgagattaagtccaaatactcaattctaaaagaatttgtttcaagttattatgttatattcctaggaatcatattctttgaaatattatgactaaaaatcttatttccgaacatatttaaaaatatacttgattacattttaatattttttaaaatcaaaataattaaataaaaatatataaaaacaaagttattgatattttaggaaataacttttcttattcccatggaaatatcattgccccatttctcctcatgatgaatcaaggtctgatccatttggattaattggttattgttttctaaaaaaatgacaactcaaaccaaaatccgatcatatttggatttggaagggtcagaatctattattaaaataataataaagatttgaataaaaaaaatcataacaaaatggaggaaagttgatggatagtctcaaaagtcaaaattataaaattacacaatattaaaattatagaatcgaacaacataaaaaataaaataaaaatctaaaatggtatagcttaaggttgaattttataatatgaatcagctttcccttttccttttaatttggtttggattgctgtgtcatatggagcaacaatacggtttgaatccactgggccaacttgtttgagccctttttaggtgaatctgagttaagattttcaatccacttctaatcctcttgcttgacaacaattggattttttttataatccaaaccaacacatctttaatccactttatataattggtttggttaatcgagtcacttttataaagtggatcatttttaaaaaaataaaaattagtttaaatattttaggttaattagttcggctatatccatttttcacccatatagggatcagtttttataaagaattgaaccaaaccttaaactctttttaaaaatggctggattaactgaaagtttttataaagtggtgtgtggttcagttttttctccaaaacgatttggtctttttggttcagtttttttgcacttccctaaaaactaagaaaaacttattttttatttcccggcttaggattagatataaatatacctaatacctataagttttctgaaattttgtaggtttcatttaagtcccgggtattaattccttttttttttctcattttgatccctagtttgaggacttaagtgataataataatagtaataatatcagtttagagacccaaatgaaaaaaatagaattaatttttaaagtaaaggctcaaaaatacaagctatgcatttaccctttatgtcaggtctacaacaaaatagacaagcaatattatcaggggtccttatagaccgtacaagttaattccgaagggaagtcagacaattgataagcataatgatgcaaataaaggaactgaaaccaaacatgaaatgttgagtagtaattccaagtaatagatggctgacctgtgataagcaaaaatagaatccctaatctgattctccccgacaaataaattaatgtctctaaacaaccaatcccaagaacaagaacactggatggtttgtcaaagtacacagataataatttcaaaatcttcaagcactataaataggcttagctctttcactttgcctttgaatgataaccagacaagcacatgaacccatagaataatatagcttatccaaaatattgaaaatcatgtctgatcatgcaatatgcatccaaaacatccaggaatccataattactgaatttcagatcaattactaatttggtcaaacattacgaatgataaactaagcactaccctaaagactcgtgtaaaaagaatgtatataaggcattactcttctaatagaacaaagcaattgaaaaaacaaggagtttgatacaaatcatttgaggacaagcttgagtaacactgcatccttgttagaacccatagatgagagtgaaataacatattggcaaaaaagcctaacactaaaaaatacattaattcaaataaagggactaaagaccaacgatagataacaaaaatagtatttctgggtacataggctataaacaagccacttacaatatagcaaacctataattttctgagtaaagactatttaggacaacgagaaaggtaagtacaaaatagacaaaaactggacattccgtaaaattctttgcctaaagaattgatcatggatatcatttaaacatttatgatatcaagtttgtccattggagagttttgaagcaagtaccccaatagtgtgcttattagtacctcatctgatatgtttgcatataaacgtgtattcactgtcaatgactccaatctaacaaaactcggaggttgaggtctcaatgaaatgggatttgagagttcctacacaattggagtaatttaaattgctattttgaaataagattgagaacaagaaaaagttttgacatgaagggcacacatgttatgaacattaaaaaaaaaaaatgaagaggcgaaaagtactaataacttacacgtagtattatttcaaaggcacgaggatataatgtcaacatttttacattggcaagcacgtgtagccatttcatgattattgaacttttctcgttccaaccttcatctgaacctccgtccctatacatgtcgatatttacttctccaaggaaaggaagattgcaagtggagaagagttggtgactgacagtactatccaaaatagtaaaagaactaagatttggagtagagagcacaatttgataagtttttcctccaaatattgtcaatctagaaagggtagaattagatatgcggaggacttgtgcatcatcatgcaaagaacaacctataagcatcaaagaatttaaaacaagacagtttgaaaagggttcagcacagtcattgtcagttgcagtaaatttgaaatatccaatcttcaagctttttaatgcaggcaggttaagagattttggaagtattatttcaggaaggtcacacccattccaaatctcaagatatgtcaaagacttagagaaaaagattaaagggatggactcaaagttgggtctaaagcctgaatatatacgcaatgtcaagtgctggacattgtgaaacacagcatatttaatgatcctatctaggtgttcaggctccgtccatgtatggcgaatagtaagattaagcagggaacaagagtcatctcggctagaaaaaacccaagatgcgaatttcttaaaactttcaaccaacccatttacctttaagagatcagcactttcaactgtcccaactagcccaagttcaaagaggtttggagagaatgtgagtttaactagtcctttgccaaggtccttccatcgtttagacaagacacaggttttaacagcatcttttgtgtccacaaaattcattatatgaagaagaacgttgtcaggcaactcactgatcctgtccctgtttgaggaaacccaattgtcattgatccactgccggtgttctctaagctgctccttcggaaacgtcatctccttcgaatatcggaaagaaacaacgaaccttccattaactaaatctcctgtgatatggccttcccgccagcagtggtcgtggaacacctccaccttgtcgccggacttgaattcctggtggctatttggtggaggaagtggtcggagatggtgaagactaacaactgcgatctcaaccgaattacaatggtactggaccaagaatctgtcggagttatcgcagccgatgatggtgcctgaaaaccatgagccgtcgtagatgctgacttccaccgcagagcccagttcgaaaaccataggtttaggcaccatcttgtaaaatgtatattgtgtgatcgagagaaataaacatgagaaaaaaaaaccatgaaatgtttatcttttcatgctgcactgcttcctacttctgtagcatatcataatatttgttatgcgcctgactcttcttcagttctacggacacacacacacagccagcaattttgctgaatgtataaaccaaaaggcatagagcaaatagaatttatttgaaatcaatgtgctgttgattaatcagtcaaatcaaatctttaatataaaatatcttttcagatagttacatctccaaaataaaatttcccacatgacccttccgcctacattgggagcaacaattaagatttgtgtatgaactgcatgaatgttaagaccaaggatatattttttaaatcaaacaaaaataagaaaagtgtatatggtgagggattaaactgtagcacttgcggttatattaaactgtagcactcaaatttggtcgattttgtttttggttcttcaaaatttgttctttttagtccaatgatttcaaggatcactcattttagttcttgtgtcactaagtgccgaacgtcaaatgaaggattctgtgacagtttcttgaccaccaaattttggtttttatttatagtttaaaataccatttctgaatgttgaaaatcaccacatattgcgttctttgaggaaactgatgatcattctcagtaaggtagatataattgagtcagattgttggtttgcactccaatatgttaatttttttagctaagaactattcaacttgattttagtgaaatgtttcatcaccaccagtactcatcttttctatttccatgctgattgccacctatttttttgttcacaagggagacatacaggataaaactgatgaatatatgttcacgttcaaaagaagtgagtaaatttacattgaattttaattagtactgcgttcatgtttcccccaaataaattgatagcaattgacaaattcaatccatcattttttcttatttttagcattagaattaacctgctgtaataatcactaaggccacaatcaagatcatccaggagggtttccggttctctggtcatccataaagaactttctaatatttattttgtttagtctttggtgacattaagattccagaagatcatgtgtggatacttttattccaacatatgatttttcttttctagatgtcaatagaatttcattcaaatgcaatgacagtgaaatcctttttacattgtcattcaataataggttgtcatataatgtttttttttaataattttctaattggttagcagtgtaaaaatatttaaactaatgtacgaaaccaaagctaaacattttttgtttccataaatttcatatgaagcagaacagagtcaagcacatttctctgcgtatccctctctacctcttgtcccctatcttttcatcttcatcatcaacttaccccgtcttttctttcaattgatatctaaaccaaaattagttacacaaatatttaatttatagatatcattgagaaattgatgacttgtcaaaagtgtttttttttatttaaaaaatcttatctaatgaaaacaattttggaacgtgataatccaaaaagaggagctgcatcagtggccatatttgggagtgaacacctagaaatacttggcatagcaacacacagaatagtaatacaagttgcttactttctttttttctaaatgatattggtaaaagggacagggaggttatgccaccacacatagaatagtaatactttgtgctgttgatgttgactttcactacggagcccggttcgaaaaccatggatttgggtagcatcggttcctgcatttgggtgttacggtgtgtctggtataatgcatgcatgcatgcatgcaacattgtgttcgcagaaattaaagacgcaaagaagagtcccaacacgtttagactttttagattgactaattcaatccatcactttaaattttaagggtaaggtaaaataatgaatagttgtagctattttgttttatggtatctagtgcaatgtaagacttaactctcaactagtggcctaaaccagtccatcctaaaatagtctgtaaattattgaattcattagtctaaggacggattatggtctaattaaagtcatactaattagtatggtcaaaatttaggaacgaattagggttaaatataacccatatcaattaatccgtcctttgtttcatcctaattttataagttattattatatttttgtattacattttattattcagatttcatttgaaattttaattagtgtcaaactcgtatcatatattagtgtcataacttatgtatttagtatataacttttgctttacattagcctaaaaaaatattttctttacatagtttttaagtttataatttgcatttttttacattatctcaataatattttaatttcataaaatatatgtgctgcactacatattaatcctttgatagaaatcaagaactcaaacaaattgagagaaaatgaaaaggttaacatagaattgaagtagacaaagttgcatgtatattatacatatataactgatctaaaagatattacaagttatacatataattaatgtataaaaataaataaaaattgaatatttgttataacaatatacatattttaatcttaatattattaattttttaaaatatgttacctcaactaactaacagaagatatttggatcagtcactgtttttaaaacaaatatctcaggcaatattgacataaaacaatgaggttcacgaccatccgtttacttttatggataagatatagatagatatacgtcaataaaatatccccactccaacaatagtgaacaaccaaacaacacatcaacagagaagccatgaaaactctgatttgtgcaccaaacgcagccttcaatctctcaaaactttctccatggaaaccaaacttccaagcttatcatcatcaccctacacacaaactcaactaccccttcaccacattaaagccacgtgctagtgccaaaggcttttcttccacggggcctccaactgttgcaagtgataatgccaatactactaagaagcccatgagaagaaaaaacaatgatgatgatgatgatgagcttccccaggaagttatgtacaggctaataggtaggatcttgttctctgttggggtgccaatggggttgggtttggccttgttgggcctttttggagagctcaaggaaaagcatgtgtgggatgcaccactgtggttaccctttttgacaacactcttgacttttggagcttcctctcttgggattgcgtatggagcactttccacaagtttggatgctgaaaaggaaggttcttttcttggggtggaacagcttcagaaaaattgggtagagatgtggcaggagaaacaagaggatgaaaactaggcagcctaatcaaggagaaattattagctaggtagtctccgaccaccatcacgtgtttatggcccccaccaatctctacatggcacacatgacacgagtttttcaatttatatgaaagaattaatagcattgaattatgtgttatgtgatgattagttgagattatgatggtccccgaggatgtagtaattcctgcttaatagtgataattttgcaaatgccaaatgggttcatgatgttgcatgagataaattagttctgtacatcaacatacccaagtggtaattttgcaccatataagaagtcagaaccataattattgttgtagttgttattataagtggtgaaagatttgagtagtttgtactaggtcttaggtttaaactttgttgctatcattgcataaaagaaaattgctcttctaagtgaaaatagattgtagtattggtctaccttgccatacgacaattttattcaatatttgtatgattttcataggatgttgaaatcagagatacatatttatgcttaccagatgcagaatttgtaagagttacacttttcataagataaatgtggatatagtattatgttgatccgcatgccaatgccaaaaagttcaatttctgttttgataacagaacctactactcatgcttgttctgtctctgctggcttgggagttattttatttttacccagctgaggggtcttgtccagtatatgaaatctccgatgagagttatgtaaggggtgttattagaaggatatgaaatctgaattcagaaaagaaggattgacatgttattttcattatgaaatacacgatgaatttttgtagatgtgtcctgtgtatctctgctgatgtgaatggaagtttaatataatagcagagtatggttttacgcaaattgaaattgatccatttaaggtgctcctttgcaaattagaggtggtctaatgttggtgtttttttaaagtgagataatctccacattcaagagattatatctcaagaaaatagagtactagtcaaggtgtaactttttttgccaagttcatgagattatatctccacacttaggcgaatccctatcatatacttgaaagatccaaattattatcacttatgtcactttatggggttaatgttacttatgtcactttatggggttaatgttggtgcttccgagcataagataaagtttatgtgatatttaatattttaagatatctatatgaaaaagactcaaagctgataggattactatatgtatttaaaatgacgacatcaaagaaatttcagactccacttggaaagcagtgacgtctttcaaaagaaagaaaagagtttgaaaatgattagaaatttcagattccacttggtgagattagattatattggggaaaaggaaaccaagcaacactggttagtgctacatggtctggcctggaataaatgcaatttaagttcaacccaaaagacaagaagcctgggaaaaaaaaattatggacacaactagcactaggcaaaatctgcctcttgcaaaagaatgtaaatattacaggagttgcttcacttcttttatttaaaaaagtaaaattaattttttttagttctcaatttttttaattcaatttcattttttaatttttaaaatcgatttaatttaaatctatcatctaaattaaattaatgatgttttgaaattatgtgatttgtgacaatttaaaatcacttagtgactattttaaatcgtcacaaagtatgatcattgacctaatttagactataagatcatattgaattaattttaaaaattaaagaatcaaattaaactctaattaaattagtaaattaaattgaatctaaaaattaagttagttgaaaaaaaactagtttaacctttaaaaaatatcaccttgtttttactttattttttctttttaaaaattattaagacagtgaaaaaaaaattcataaaaatttatttgcactatttttttcaaaaaattttaaaataagaaacaaaataacaacagaataattttttaattaaaaatgaagaaaaaaatatttatcaaaccaaatttatttaatatgatcgatgaaggacaactttacaaaaaggagataatcgattaagcaacagcctgaggtatgcaatcatccgttctatttgtgagaatacacgtttgtttgtaagaacctatttatttactacacaaaagcttgatgaaagaaaaaaattattgctgttccgaagaaatgaaagatttttttcatttaatataatattattgaaaaagaggatacagagtataaggggtatccacccttacaatctggtgattagtttttttctgtggttttttgtaagagccaaaataaatttattcataatatgactaaaaacacaagatgtgttaattaatcgtcttaccgtccaagtaaattacagccatattcgtgcagcataacaaaagtcaccccccaccctttcaaaagaccaaaacggaaaattctatttgtacattgatttagattattttctttcaggttgtggtaatattaaaaaagtattgtgctgttatgtgacaaagcaatgtcacttaatcctcttcttaagtgataagagaaggttgaattggcattctctttagtaaaaatattacaaatcgaaattaaaaaaacaggcaatcaccaattagtgattgtttgaagattaggcataggtcattgacgctaaattataatattcaactagatgtgcaagctatttttccttttgattgcatcattcagttttaggtttttttatcattaaattgatgtgaagagtattaattgattttatcgataaaaaatttcctctaattaactttttcatgaacaaagtattgagtttgatatcttaattaaggaatccaagtccaattctattcaaagatgttggtacaattttatttatttatatttaggtttttaatttattttttttattaacaaatattaattattaattttttggttaactaaaaaatttgaacccataatcttttttttccctctttctttaccatcaaactaacgttaattataatccctattttggtttttaatttgatcaatatctgtcatatcctataaacaattcatccttcaatcaaataaagtttaatcatcttgattattacagtgttgcgtgtctccatttcacactttttaattaaggctgcatttctattgtaccaattattaataataaaaaaaggcactttgaaagacccattgtgccactactagcatctattttatatatttacaccaccttcatacttaagagttttagaacactccaaccgactatatacttatactcatgaatattcggatttagtagaattaattgaaattttaatcaaattcgtttaatcgttattgaacaactccagttttgcaaacagtactttttggttaacgatcaagatttacttgaagcttaagaaggcttttactccttaattagtcctctcaggctttctgctgtttgatgtgctaggtcaattaataatgaacattctatatattatatataaagtatggagctatatggtatgatctgaaaaactcatcgtagatgatgccttaaaccttaaacaggtcgtctgagaatgaaaaagagactttaactatgtggttgaagtaaaaaaaataaaaataaaataaagatagagaaatggttgaattagtaacaattgtatttaagaaattggatccttgattatatactaaaattgagcttttatacttactcaatttagagaaatgatatacaaattgctaattaataaaacttattcttaacaaccttcaaacaattcaataacatataaatatcagaattgtcaacttcattttcatgtcatgccatcataaattcctccatgtaaaagtggatattctaaatgatctattgtctgatatgaagctccttactccttcttttttgttgagtcatggaatctcttaaaataataaaacttatcaatgttacgtgtttacaacaatgagaaatagaaaaaaaaaaggtgtattgcaacatcaatgactttgtcacgtagctagtatatataggcccatcgtcagcaattagagaatgtacgtggggtatttgttaaattcttagtaaaagcgacttaatgtgtgttaatataagtggttaaagattcaaaattaatttttattatctttctatatgcaagtttgattctctttgtaagtgaacaattcattttagagagatcttttcaagtccaggaactagtttagnnnnnnnnnnnnnnnnnnnnnnnnnnnnnnnnnnnnnnnnnnnnnnnnnnnnnnnnnnnnnnnnnnnnnnnnnnnnnnnnnnnnnnnnnnnnnnnnnnnncaagaactaacaataaatgtttccgttaaaatgtaaacattataaatatcttatttttaatataaataaataaatctgattttcaaaatatttaaaaatattaaagacataattatcctaatatctatagggttgggagattcgtgtgcttttcattactaagtaagtaattatatatagtaccatatttcttgcaattagatacaaattatttatgtaagtgcatggttttacctagaaggactggtcctatatatattgaaatgagaattgagctgaaaattgaaaatgccaaaacatcaaaatcaatttctgttgaaataatagctaaagtttaacattaatataataataacttcaaaagtatattttgcaggaaaaaaggttaacgatatactttagtgttgtttcttcttcataatattatatcagaagaaaaactcaccttgctaatctcgatgcccctaacaactccaaccatagtaggtgccagctaatcattggggtccccctcattttatatttcgattatttgagggtaaaagacattaaaatatcatcatgaaaaacgacataacacatacacagaagaagtaaaataattaataattttgattttttgaatataaaatgttaaataatgactaaaacaatgtaggaaagaagagatttttgaataatgttaaagtgaagattctactttgttaatatataacctatataatatatcccatatattcaactttacaaattaatatcaaccagagtgtgtgatattatacaatatctacacaagacttctccgtttgaacattactttagttgctttgatttatatgaaaaagactgaaactgataagattaattatatgcatttaaggaaaattagtgttggacactctccggagagagtgtatgtaatcatatatataccttttgggtagaaaagagatgtaaaaaaacgaaagaaaaataaatatgataaatgatgtaatgaaaataaaagaaaaaaattaatgagcatatagaagatactaatagagtgccaaaaaaataaaattatatttaaattaaacgacatcaaagacatttcttacttcacaaccgttgccatgcatagtttttttttttttgtgtttgaaagaaaacaaattctaaaatgattagacgtgaaattaatttttggataggaagaagacttggatagtaaaccagtggccggtgcaatcctatccatggtttcatggagctttcaactgtcacaactatatattgcttctccttatcatagacttgcttaagctcaagaggggttggttttggtcaccatgttggtccacaagatgagaatatgtacatgcatatattttaagcaaaagtgacatattccaatcttttgaaaataaaaatcatcaaggaagaagtaaattggtacaaactttcttaagactgtctttgaaataaaaaacactttacatgaatataaaaaaaaatcataaacttactgaattttctttactaaggccctttgagttccttgagcactcataaacaaattaaagagcatatatcggttatttctgtttggacaaagtatttaataagaagatgaaattaacatcatagtaaggcagggttagaaatgagtaaagttggatcaaatttgattaaacttgactcaactctagaaaaattcactcatttgttcaaaatttgattagagttcaatttggatttttatttttagtttaaacttgacttaatttaaatatgcaaacaacttgattcaaattgttaattaactcatttcaatttaaaattatgataaattatttatttatttagtgtagaaataaaattaaagactaattatatttttaatctcttaatttttaaaaaaaattacttttattccataaactaaagtttttcactaaatttgaaaagtaattcactcaaccaattttaacagtgatatttgacaacagggactaaattcattaatgggacaaaagtttaagaccaatcataatttaaattagaaattaaaaacataattaaccataatgaatatgaaattaattaaaaaatttaaatacatcaatttaattatataaaatattttacttaatatatatgtgtttatgtgattataaaaaaataatattaaagtacttacaaccaattatacgaattaatataaaatatttaatacataaataggttgattcatacataaataggtagatatgtacatagataaatataaatcaagttggctcataaatcaatctaattaaattttatataactcaaattcaattcatgtgtttaaccagcttaactgttgtttaatgtttaattcatttgattgatgaactaaattcaataaattaattgttgaattaagtttcaaattctattaaaattggttgaattcatcgtgagttttactactagtaataaacattacaaattaaaaaatttagtgattatttgaatattagacatagatcacaagattgagtctctacaatggcacattttttgtcactgatattttctagcatccattttaaaaaaaattatttgtattatggtttttaatttgataaatttctgtcatatccttcaacaaattcatccttctaccagttacaagtgtaatcgtcttaaaaataatttacatgtgcgaactcactgttatatattttcttaattattagttacttgtcaccactttttttttttattacaatcatttatcaccactttgcacctttaaacttcttttcaattctacccaaaaagggggaagaaactttcaacgatccttatggtcacatattcccatcaccatcacttttatattcaggagttttagacgaacaccactacctttatacttttttttttctttttacgttcactaactttatatttacacccattcagaataacccgatttagttgatgcattgtcggtcatgagattttatacgtcttgggcgaaataataaatttggcctcttttatactcaaatatatattatataaatcggaatatgttacaatcggaatcgccatgatttataaatataaatatatattatatattaaaaaatagatatctcatttcattaaaaaagatatattttattaaattacacaaatagcatagctttaatgatccagaaatgatatatcatatcttttatttaacctcttatgttatcatttattatttaatttattatatcatatcttttatttaacctcttatgttattatttattatttaatttatttttaaaaaaattacataaaataaatatttatgtataagatagacataataatgaaacaaagtgaagataagtttaattatctcattttcacctcggagaagacaacatatgtttaggttcaaaagaaaatgatttatgtataagatagacataaacttactgaatttactttactaaggcccaaagagttacttgagcattcataaaacaaattaaagggcatatataggttatttttgtttggacaaagtatttaagtaagaagatgaaattaacatcatagtaaggcagggttaaaaatgagtaaagttggaccaaatttgattaaatttgactcaactctagaaaaattcactcattagttcaaagtttgattagagttcaatttggatttttatttttagtttaaactcgacttaatttaaatatgcaaacaacttgattcaaattgttaattaattcattttgatttaaaattatgattatttatttatttagtgtagaaataaaattaaaaattaattatatttttagtctcttaatttttaattttttttacttttattccataaactaaagtttttcactaaatttgaaaagtatttcactcgaccaattttaacagtgatatttgacaacagggactaaattcattaatgggacaaaagtttaagaccaatcataatttaatttagaaattgaaaacataattaactataataaatatgaaattaattaaaaaaatttaactacatcaatttaattatataaaatattttaattaatatatatgtgtttacgtgattataaaaaaataatattaaagtacttaaaaccaattatatgaattaatataaaatatttaatacataaatagattgattcatacataaataggtagatatgtacatagataaatataaatcaagttggctcataaaccaatcaaattaaattttatataacttaaattcaattcatgtgtttaaccagcttagctgttgtctaatgtttaattcatttgattgatgaactaaattcaataaattaattgttgaattaagtttcaaattctattaaaaattggttgaattcatcgtgagttttactactagtaataaacattacaaattaaaaaatttagtgattatttgaatactagacatagatcacaagattgagtctctacaatggcacgttttttttcactgatattttctagcatccattttaaatttttttatttgtattatggtttttaatttgataaatttctgtcatatccttcaacaaattcatccttctaccagttacaagtgtaatcgtcttaaaaataatttacatgcatgtgcgaactcactgttatatattttcttaattattagttacttgtcaccacttttttttttttgttacaatcatttatcaccactttgcacctttaaacttcttttcaattctacccaaaaagggggaagaaactttcaacgatccttatggtcacatattcccaccaccatcacttttatattcaggagttttagacgaacaccactacctttataactttttttttctttttttttttgtttttttacgttcactacctttatatttacacccattcagaatttcccgatttagtttgatgcaagaccggtcatgagattttatacgtcttgggcgaaataataaatttggcctcttttatactcaaatatatattatataaatcggaatatgttacaatcggaatcgccatgatttataaatataaatatatattatatattaaaaaatagacatctcatttcattaaaaaaagatatattttgttaaattacacaaatagcatagctttaatgatccagaaatgatatatcatatcttttatttaacctcttatgttatcatttattatttaatttatttttaaaaaaattacataatataaatatttatgtataagatagacataataatgaaacaaactgaagataagtttaattatctcatcttcacccggagaagacaacatatgtttaggttcaaaagagaatgatttatattttttaatccaattctcatcttcattgagttttattagatttgactaaacttgtgaggaatcaatcacattattttttataaatttaattttttgtatatttttaaaatattaattttatatttataatttaatttaattttatatttgtctctaaaaaatataatttggtcactatcacccatcatagaaaaaatatcatataatatttaaatttacttatatttttgttctttattaatattgatttttttaatttcctttataatttgattttttttggttttatgtttatttttttaaaaaaaatcatttaaagaaaattttgaatctattatcataaatccaatacatgtttatatcaaactgagttaaaaatttatataatggacttactaagaatgttatacaataaaacaaaagcaaacaactaacataataacaccttttaattacgtgtaacatcttaatttgagtaaaaagagaggtgtgaaataaaataataactttagttcatttataaaaaataacatcaaataatataatttttttattatataatcatataaattttttaaaaattttgggccccttttatccttgagccatgttccatcgcacctccggaggcccaggaccagcaggggtttgatgcattaaaattttaattaaattcacataataagctatatattttgttttataaccacttggttaaattcacatagctttcgtccttttcagctgtttgataatcgataaaggatatggcattatcagaaaacccatggtgggatatccagcatgttctattgtcagatggaaaggcccttcctttttatatgaaaaaatggcacgttctttccttcatgttatgggatctaactttttattaattcctcttatgccccgtatttgtgagatacataaagagaaataaatgaaatatttatactgctaagatgtgaattaggaattaggatgggtataaggaggccaaaatatgtcgttaaatttaaatggtgaaaaatttatattgaatttaacatatatttatctagtttttatttttaattcccataacactagatgataacacttatagttgtcatccatttaatttaggattttgagtgtgtaagacatcaatacaaatatatcactagtttatcttttatcttctcaatggctcttttaatggtagttttctctaattttagagtagcctaactagttgtagctctctaatactttcattattgttaagacttgaaagtatattcaaaagtttaactagtgggagagtcaaaactagtgggagagtcttttacttaagtatcacatcttttgacttgggtgggagagttctaataattactgtttcactcatttatctatttggtttgcaccttaattcaacttataagttgttcttatcatagcacaatttttaatggaaacatcaattattagaacttaaatacatgaggagaactcaatacaaaaggctacttcattttcttggtgttaatcgtgaaaattataaatagtttttaaagaaaattttatgtgtcacataataatttttattagtgattctttttaaaaaataaatgtttaaatatgagatccatttaaaatattttatataaagaatttctccaacaattcatataataaaaattccaataacacatgttttttataataataataatatttttatattaattatataagaattttgataacaattctaattatatgatatatgagaatccaacaatgaatttgataataataggtaaaggagattgtataaaaatagaattgagaaaagaaataaagatagaaaataaataaaagttcacagaaatataagaaaataaataaaaacaaattttattaaaggtgaaatgaatacatattctgtgacttttgaattaataattatttttgaaacacctcatttttcataaaataaattaaaaataatttttttctttaaaaataaataatttttaaaaaatgatgaggtttttataattaaataaataaaaagaaataactttattaaaataatggttggaaagaaaataaaaaaaatattttatttattcatttgatataaaattatatatttttaataaattttaactaatatataataatgaatgcttggaataatatgttaaaactacaaaaagatgtattaaaaaaataatacctccggttcaatttacgagaaacaagttatattattttacaagtctagacatattttatgcaacaacttatctagacatattattaaacattaagggaatttagataatgcataaattattataaacatcttgatcgatgccgtttctgattctaccgggaaaaaaaataatactatcaggcttcttacgtatttaattatgcgagtatgatctctagctaaattcttgtgtacaggaaaaatatatgctgttcttacctatcagacactaattagctatagtcagtttttccaagttgtatacatacattaaataggaataagtgcattaacgacatcaatgacgtagtctcacagatattctatatgtcacttttatcaaatatatagcagtaaaatgtacatcaaggtcccaattttttcccaccactaaaatctgtgttatcgtaatcatcttggtcaagatttattgtcatcctaatcagcttagaattgaaccttaggttgtgttaaatgaggaattaagttgtcattgtcaacaactattgtgaaaggttgtattgtacagcatcttgttttcagtttttctgaagaatcatgtacactgtttgttattggattgtatagactgtgatctctttggtgggtcctctgtactgatttttcagattaaaaaatgttttattgtattcagattaatgcaccaaacaacaaagaatacagtcattctatctattcacatattccattttcagcaatgcttatgcaaacatgcaaccccctcccctttagtaatttttaattttatttcttttgccctttttttcaaaaatctttactttgtcttctgaactttttgttttgcccctggtgcctccttgccatgtctaattctcaaaaggaacaacacaaaccacagactaagaattgaacacctgaatttaataaaaccaatttctcactgccagaaatttgaatacattgattgtactacaccacaaaataatttacatattatatatctcagttttagactcctttttttttcttttcttttatgaactaaaacaagaggaaagcctgaaagaccaaaacataagaaagaaaagaaggaaaaagggaactccaaaagaaacataattcttcttcaactccatgcagccaccatcttttcttgatctcattttattatccatcatttcaaactccatatgatattccaatacttagcaaataacacagctagttggatcctcttccactgttctgtgataataaggggggtattgctgctgtctggtctgattataaaaggcgttcagaagttcagcatattcctcctttggatctttcttgtcttctggcttcttctcatctttctttggttcctctttcttctcctctttggctggtccaactgatagtatatcagcatgatcacaacattttctaagcttgccaactactattacagcatcaacattcccaattatagtcattttcaggtcattcatgtccactgagactgtctccacccctgaaaaaatgaccccaaaaaattcaattttgtataacatatgattttttacccttgattaactaagcataaaaaagcatatatatagtaactaacatgagaacgattattagatgttgagattttatacctgaaataccagatactgccctcatggcctttttcttggttttgtcgtcatggatttccaactttagcacaattttctgtcatacaaaaattatagaacttttaggatctatagttataatcatttctaagcatgaaaattccaaaactaatgatcacttaaacagtaaaaggaaaaagaataaaaaggttagaagcaagccatggccgtaattttcacactaaaacttagcttgttctcaaatttgagtatcaaacagtacttaaggagagcaaaactcataacattttggaaatcatgtttgcaaattaaggatggaaacagatcaaaagtcacaaaattttagtttcataaggagagaaaacttgagagagggtacaaattcttaccttcatattgatttgaaatgaagttgggaactgggaaagggggattctgaaggagtttgagagagggttaagagattgttctagttgaactgttagaacttgaagcacaactgaagtacttatatgccaacgaaagaaatgctacaataaagacaaagtcaactgaagtcaaggccaacattatagtctgtttgggtcagttagtcagcattatacagctatgttagaccccaaaagccattatatatgaatgtataaaaaagtgttcacttttggatttgttatttgctacgaatgaaatatcacggatggcttccggaatgatgtgtcctggcaaatcatggctcctgaatttctttgaagctcactatctgccaaatcgatcttatcattttatgtggtcacaacttttgtaaattatctctatattaaattcaaatatattcttgtgagggtaatttagtttttactttgattctttttttataaatgatgtacattatttttctaaatttttcttttataattttggttatagaatttttatttatccttctaaattggaagaaaattaaatagatagatacatagaagataaatattagtagagaccacatatatatatacatatatatatatatacatatatatatatatatatatatatcctttataagaatcaattttatttgaacctttgaatatatttaacgtggtaacatatcttaggttcaaatttgacacattcatatatatgggtgtgtgcaattttcactattttattttaaaaagttacctaagttaaaaaaaaaatacatgtaaaacacctagtactagttggcaattgaagcctatgttagaattagcattttgacacttcacccctcttctacaccaaacgatgtccttacgagcctgtttgaaatcatgaaaaggttgtttgctttgtttggagtttgtagattaatagttctagttcaagttcaattcagcccatccacactaatttaattaattaagtgaaacagtagcatactgacaaatcctccacaggtggaaacttgtctccacgcgagagggattcagactcaaaagtatgtttgaaaatataattttcaagaaagcaaaaaaagaaaagagggacaattaattattttatttgtaaatgaagaaattcagaaataaagaagatattaacatattaaatttatattattttttgttctttctcaagtccacttcccaaaaccgcgttagtggctactccgtgttgtattttcaggcccttgacccgatcacgatcgatgtagtctttgccaattgcgaccacgaatgctaaaaaagtcactctaactttgcgaccacgaatgctaagataacttggatgagataagaaaggattaaatagtatttgtaacacgtgtgaattttttttatttttaaaatattttttggtttcatttttctaaaacttgaaatagtaatttttccttacaaaataaaataattttggtcttaatatttatttttggtttttatttctctgctttttttttttcaaataggaaaataaagctttattcataacaacaacaacacaaggtgttgttgatgaaagattacaaagaaaccccaaaaggcagcacaacatttgcagaccatactatggcttacccttacctagggctggaaacaggctgaatcgaattaagttttgctaggcttgaatctaacttgtaataagttaaatataataataatatttggtctagtaacaagaacatggtctcaattttggtctagtagtcaaatattttttaaggatctaagtctcaactacataaaagtttggtatgatgtaacctacaagtttgtttataggcttcatttgtaataagttaacattaaaataaaagtaaaattatgaatgtaaagtttaaaaaaaattaaatctaacttatttatacaatttaagcatatttttaagatttaacataatattcataaaaatttatttaaaaatatattttataataagatataaatttattttttaatgaacttaattaaaaactttagcttaactcatttgtcattgttttttggtactgacaatttcgtaccaatataataattaataaaaaaaatctttatatagatagatcaacatgatttatatttaaaaagagaaataaatataacattttaatgtgtttcaataaatttaatataatattattattaataatgaatattatttataattttttaaatagactagtttcttaggcattgtttaattaaataacttttataaaattcttcagcttacctattttctagaaaaatttgacttagtctgaacctaatataactaaattataggtccttctcacacgacctcacttatttacaccttacgcgtattaaacgcatacattctttacgaagtcaaaacaataataggctacaaagcgcttccttatagtttctattttctacacaccacaaacctgcagtactttggattttatttctcaaaaatttgaaataattatttctaatttttagaataaaatatgtatttgattctatacttttgatcaaatttagttttaatcctttttagtttccaatcaataaaattggtccttatacttaaaataaatagatgaatttagtttttgcacatggatgactaacgatcaaatatgaactaaatttacctaatttttaagatataggaaccaaattcatcaatttaaaattatagagactaaaactaaatttgaccaaaaggacaggaaacaaaatcatttttagtccaatttttaatatttagtttaggactcaatgggagtacttaagatagcctatttctatccccaccctaaattttgcccttcacacctgttacattttaaaaaatggacagaaagagactcttgtcatccttctatttatctgcgtctctagaaaatacttttattttcttacttttatattaaaaaaaatatgtttttttatgtattcataaaagtaaggaaaaaagtacacaataaaaatgtttttgttttggtgcaaaaatcagtacacaaagaaaacaaatttttgttgattaaaatatacaacataatcatattttcattgtttatttcttgtcactctttttacacaaaataatcacatttttcttgttattttaattaactgaatcatgtttttgttaggggtatttttggaaatttcaaattaaacgaagaataaagtgagatagcaaaaaacaagttgagaatagtaattcccgtgagagtagatttcaagaggacttttgcttcctccagaggtatatgaagtttcactcattcgacaggcaaaacccaaggcccatgcctgagagcttaaacaaagagtccaaccaactttaatgaggagagggtaaaaaagttttcgattgagaaggatatgttaaaactttttatattgaaaaaaaaaattaaaattggtgttataattaatgactttgcatcttgaaaaaataatttttataataatatgtgcattttattcttggtgatataacttaaacccaaaactttaagatttaaatttatgaatctttttcttatttatatggtgatcaattttttcacttttattttatgtaaaattttatttcacacttataacccatcaccttatgttggtctagtctatcctttctttagataaaacatgttactacgttaaaagaagaaaacacttttcactcaaaatcttggtagttttgtttatgatcaatgaggcatcaaatttttgtctgcattttacaaaatgacaaagttttgtcaattgtcacgcaccacactatgtatacatcattatatatttactctcttggacacaccggtcttcaatctactagattttttttttgctcagccttcaatctactagatgatgcaaaatactagtacaaataatattaaaagcaacaaaatgactacttggtcttttatttatttatcaaactttccaatattctgaaatttagcagatgacacagccactaggatcctcttcgtaacttgtgacatagtgactttgaccataatgtggtgtcatctgataataaaggggataggcttcatggagctttagaggaactggtacttttgctggctccacattctccttcttctcctcttttgctggtccaactgaaactatttcagtgtgacaacactttcgtagcttcgacactgcactcactggatcaatgtcccccaacacgatcattttcatgtctttcatatcaacagaaactgattcaacccctgcaaaaataattacaagcaattttgttaataaaaatcattgattccttgatgctgcatgacatgtattaattgtgcttcttgaaacaaaagcaaagatgtacctgaaaggccagatgctgttttcatagctttttgcttgattctatcaccatgtaagtccaactgtaagactactttctgtaacacaacaaatcaaagagcagttaagacccaatagttaattacttctacatttaaaacatgaaaggaaatagttaaatacaagatctagtggaaacaaaacagtgtaaggctatccctgagaaaattaaactcaattagaaacattgattagtggatgaaagggaggaaattataaaagagattggtttcttcatctagttctgaccttcattgtcgttgctgaagcttgcttgtgagagctaacaacaattgtttggtgacaaatgacaattgcaaaaaaggaagtctttttattttggaaatgaagttgtgatgataagtatagctgagattgagcattatttatagtagcatgaggtgagagacttagtccagtcaagtcaagtcaacccaagtccactcataaagtactactatatggtcttcaaaacattgttttgttacacaatttacgcggtggaaaccgtgtcatcattaaattttgcatcctataactaccctacagttccttcacagaaagtgaatcaacgaaattttatagaagaccaataattgagggtttttcttattttattttaatcatgcgtccgctagtgaaaatgacagggcatcagtacatattgcttcgtggttacatcccaaaagacaaataacgaagaagttgggaagttttgttggtgattaaacactgacgtcaacatggcataccacacgttgttcgtccatcagtcaccagatttcttttgagtcatggtatttaaaagttcaaataatacaaatattaaaattataaatttagtctctagtttatctttagtttcagatttgatccttcaagtcatttaattcacaaatttggttcttattttataaaatcgtgcaatgttgatcttttaggtcacaattggaagttgatcgtgatattgactgtcacgtgtaacgttcttatcttattggatgatgattgatacgtgtcatgttctgattggtcaatgaaaacaacaattcatttcatatttcatgaagttgacagtcaacatcacttattattaacagttaacgtccaattgtggtatggagaaccaacattgcacgattttataaaatagggacaccaaatttataaattaaattactggagtaccaaatttgaaactgaaaataaactgaaggaacaaatttacaattttaccatatacatatatatatatatatatatatatatatatatatatatatatatatatatatatatatatatatatatatatattcactttatatcactatcaagttttaataatttttgttctttcttcctatcgttaggtgtagacatgggttcataaatttatttattaaaaaacattttttttaaattgtttctgtttgaaaaatatttttcttgtttatttttaaaaaataaattttattttcttattaatattttaaaaatatattttaaatttttttttaagtttaaactttttgacctgtgttaatagagatggtaatagaggagcagatcgacagttttgctagttttgcatttaccggtagaaataggatctggtttgaggttttccacctcatttgttggacattgtttctgccgatgttctgcctttgggctcttctttggaatgatattgcattcttaccctaaaaaagaaaaagaagctatattcatgaacttattgctgttggagttacccgcagcccccaaagtaaaacttgctcaccactcctcttttctatgatttataactaatttacaaaagtaattaaatatctttaaatttatactaacatataaaaacaaaaatttatatttttgttaaaatcgatgccattttttggttaaaatctatgtttttaataaagtatcatgaccgatagatccacccaaaaatatttattcctacaaaattcatgcaccaaatgccaaatcttgagcttggttttcttaaaaaaattattaatcaatattagttcttaatttgttatttgttttagtaagaggaatttaaatcctaatatctcttctctttttttcattcaactaccaaatcaactttataactcttgaggttgagggttgtttaatacatttttaactattagacaatcttcttccttgaattagatcaatccatttctaataatattttttacggcttatttcagctgttcatagcaaggtaacccatcacaatagtaaactatataagactaatcctttgaggaagtagttaacataaaattcttcttcttgcacatgtgttggtatatattcacatagccaggaaacaaattcctgacaaaggatccaagttacttgtcacttatacctcaccttgttgtttttttacgacttatttgcacaagtttttcaataacaaaaatttatcccgaaggatttgaaggccactttctcgttgggacgtaacctcacaactagatattctacaaagagttggattacaatccccaactacaagcatgttaggaaattcgttgtaaaattatattttgggcaaaaataattttaccaatggtaatattttcattttcaagtcgtaatattttcaactgtaaactaaatatgcactgcatatcaacctttttcgagaaactattcatatcaactaaagtggtcatttctaataatattgttattgatgtgaaataaattttaaatttgatatacataactagtaataacattataaatataccaatgatagaaaaagtattaggaagagaacatttccactcaaatcttggttattattatttatgaataacccatcaaattttgtctaatacattttacaaaatgacaaagtctaatcatacactacactaaataaagtacatatttactcccttgtatctattagatcatgaaaatactaataaaagcaacaaaatgagtgtctttttttatatcatatattttctgtattctcaaatttagcagatgacacagccgctaggattctcttcgtaacttgtgacatagtaactttgactatactgtggtgtcatccgataataaaggggataggattcatggtgcttgagaggaacaagtacttttgctggctcctccttttctgtctccttctcctcttttgctggtccaactgaaactatttcagtgcgacaacactttcgtagcttggacactgcactcactggatcaatgtcccccactacgatcattttcatatctttcatgtccacagaaactgattcaacccctgcaaaatagttacaaatgcaatttaatttgttaaaaatcattgaattaaatccttgacacttaatggtatggattttatttcttttgaaacaaaattagcaaagttgcagtgcagtgaaagttttgatttacctgaaaggccagatgctgtcttcatagctttttgcttggttctatcaccatgtaagtccacctttaacactactttctgttaaagaacaaaccaaagagctgttaagatccaacgattacttctaaacatgaaagggataaaagttaactacaaggtctagtggaaacaaaaaaagtttaaagctctgagaaattcaagaaacattgattatggaaggaggggaaattaataaatgatatttgtctcatcacatgagtgtttatttctaaccttcattgttgttagagcttgcttgtgaaagctagaaacaagaattgtttggctgaggagggtcaacaggtaacttgggttgttggaatattaattaggagatggtttttattttggaaatgaagttgtgacaagtatatagctaagatagattgagcaatatttatagtagtatatatatggtgagagacaaagtcaagtggagtcaacccaagtcaaatcgcattgtatatggtcttcaaattaaacttaaacaatttgtttggctacacacggtgtagtggaaagtggaaaccgtgtcatctttaaattttgcatcctctaactaccctagctacagttccttcagagaaagtgaattaatcaattaaatcttcatatcttacaaagagtgcaatcattaaaggcttttttaatttttatttttcaaaagcatcacgcacgagtctacttggtaaaatgatactgttgggttataagtgtgagatgaaatctcatatccgcaaaagtgaaaaagttgagcattatataagtgacgagaaaattcataaacctgaaccttaatattttgaattaaaatgtaatgtcaagttcccttatatgatgattaatgatctaccagtgtaaatttatcttaatatttactccttttaaattgttcaacaattgatattatagtcgataattcgacttgataacctactcatccgagtaagatggaggagctgaagtcccacataagcaaaagtgaaaaactagaaaagattaatattaaataatggttgatgcacatggcaataagttttggtgtatgacgtcaacatggcttatcattacaagttcgtttaaacactgcttataataagacttctacaattttttatctttgaaataccttttgggagttaagtaaagaaatgcatttttaataatatatatgatatggatttcatattaagtaatgacgttgaatgaagatataataatttagtgataattcattggtttagtgcatacggcatcctaacaaagcaattatgtaaaaaaaatttattgtttttaaattttcatttatttaaagtagtgccttgataatgtcaaactaataaattagaggtttaaataacttttggttgtttgctaacatgacaagtgaatgaactatcaatattattattatagtatcggttaatgttatcatttgacaaaaaaaaaaaaatcttaaaggattaaaaaaaattaaaagaccaaaataaaaaataatattttatatgaatcaaaaaataatttaagcctaataagagataagattaatcgacacaggcgattaaatttttgtaaaacataaaattatataatccaagaattaaattaaaagattttagaaattagaccaaatttataaaatgtcaatcaaataaaaaaaattaattactattttattgccctatattatttagacgaatagtatgttatgttaaaggaaaatactcaattgcgtagcacaagttttgtaggacgaaatgaaacgaatatatgtgtttgatagattaatttgacatgagtgatgtaccgtcaaatgcaaataatcacttgctgttttttaaaaatgtttgcacgtgtccattcgtatatttcgtgcaaattttctttcacataaattttaaaaaaattgttgatttattgatttttacataataaccttaaaacacacttaatttaaagagaacgatgtagaagtgactttaatatttgaatgatggaaggaagtattaagagaacattctccactcaaatcttgatagttattacttaaatacaacgcatcaagtttttgtctacattttacaacatgacaaaccaacatatataccactaattgcagagtgcatatttactaccttggacaacaccataatcttcaatctatttttttaacaacctttagctctctgaattggaaaggatgacgaagaatctcataattaaactttagttcttttgagttgatcatgtgattaatcttccacgacctgaggctcaattagttgtcatattcaaatgttttcatctttttctaaaaatatatttttataagtatcaaaggacatcttcaatctaatagatcctactttgtctttttttttttttttatcaaactcggtttttgtcttttttcatcaaactttctaaatttagcatatgacacagccacaaggattctcatcgtaacttttaacatagtaaatttgaggatatggtggtggtgtcatctgataataaattaagggataggcttgatggagaggaacaggcacttctgctggcttcaccttctccttctctttctccttttttgctggtccaactgtaactatttcagtgtgacaacaccttcgtagcttcgatactgcactcactggatcaatgtttcccaatatgatcattttcctgtctttcaggtcaacagaaactgattcaacccctgcaaaaataattacaacatgcaatttagtttgttaaaaaatcattgaatccttgacgatgcatgacatgtattttgttatttgaaacaaaagcgaatttgtggtggtagggtaaaaattatgatatacctgaaaggctagaggctgttttcatagccttttgcttgattctatcatcgtgcaactccacctttagcactatttcctgttacacaacaaatcaaagagctgttaagacccaactacgattacttctaaacatgaaagggaaaaggttaaatacaagccctagtggaaccataacagtataaagctctgagaaaactcaagaaacagtgtttcatctcatgagagtattgttctgaccttcatctttatcaaagcttggcttttgagagctaagcaagagtatttgaagatgttttttgttttgcaaatgaagttgtgagaaatatggctgggattgagcaatatatagtagcatagcgtgggagacacagtggagtcaacccaagtcaaatcatatagtatggtcttcaaaactttagtactattacaattatttttgtttacgttacagtaattctcgatacttcagtacaaataattttttttataacaagctattctcacgattaatgtcataattaagactaatctctcgataatagaataacaagaaaatttcctctccttaattgttctattcacataggcaaaatcaaactcttgatatatgtcttagaatcttaaaaatgtaaatttaggtctaactcaatcttaaaagctagtttaaggggtgagggttactccaacaataaatggtaggtgaccctttggattaatcttaaatttgttttgatatcatcttagaaggtgagtatagacctaactcaattaccctaaaaattaacttaaggggtgagaattgttcctcatttatatattctaatttaactgtatttttagttaacgtgagacttatatttttttcaataatatgtttaaaggtccaaactacttgttactttaatttgtcatatcttttggatcaaaccgtgtcatctttacctaccctagagagtttcttcatggaaagtgatcaccaacgaaatcttataaaaaaaaaaggtgtaatcactgaaggcttttcttctcttttcaataacataggggtccggttcggaaaaaggattgcacattttgctttgtggttatatatatccagaaaagttaaataacgatggacattgttgagaaattttaaagattgttttggtggctggcattgacgtctacatggaacattaccacatgttcgtcccctcaggcctttttggactgataagttacaccaatccatttcttataatcaattattgaggtggaagaaattttacattattactaattattacatagatagattggtaataaaatacagatgattttaaatttcgaatgatctaaataagtatatatattaagagaaccttctccactcaaatcttggtagttattacttatcattaacccatcaaatttttgtctagattttacatgcaaaatgacaatttctagtcatacaccactaattacagtattgcatacagtcttcaatctactagaaaatgacataaataaaaccaaccaaattaattatgtcttttatcaaactttgtaatactctcaaatttagaagcctctctaggaatctcttcaatgatcaatactactaatatagtaattttaattagactgtgttggtgtgtgccatgcgataagggtacttatgttgggtccttctctgatcattatcctcttttgctggttcaagtccaactgaaactaatacagtgagacatcacttttcgtggcttggacactgcactactcactggatcaacttccaccgataagatcaatttcttgtctttcatgtcaacagagacggattcgcacccctgcaaaacagtcgcaaaagatatatattggtttcatccccatgggattggtagtctagttctgagcttcaatattgttttcaaggtgtatggattaaaattttaaaaaattattttgacataaaaatattattacagagaatttaaaagattgtatatgcaggaatgtaatcatattttttagtttaaattttaataaacttatttatttcataagaatttataaaatttaatttttttataaatttataagatttaaattaaaagtaaccattgattttttttaacattcaaacttacaagagtcattaataaaaagataaaataataataataataataataaagtttagacaaagatcgtaaaatcaacacaaatttaatttctaatctattaaataagaacaaaaaaggcatgaaaaatggatggttatccacatcaatgtaactgtcaaataaagacgcaatagcatcaatgtttctaaaatagaatctattcacaatacacccctataaagtagatggtttttatgcatgctttttaactgagcacagaaaaaaaaaaaaaaaaaagccaagtatctttatgcatttttgacatattctttttggtgatatacacgatgaattcatccaaataagttgattaaagacaaaaataaaaagtaaaaatatcttttacctaattggagagaaggagtgtatgatagggaaaaaataatcaagtactgtatcaatatattggtaacaaaaagagaagaaattatatatgatggcaaaaagaaaagtctagcaaattttaagggtttggatccaatggttggatgttataaaatttatacatcttactattttactaaaaattcacaaaaaaatcatattaaaattcatcttaattacaaaataatccataaaaaattatttttttttttaatttcagtttgtatgttgtaataattttcggttaaactcatcagaatttgaaatatcttaattgaatatcataaaaattatttatattattaatttaatttttttattaatactacaaaagcattttattacaacaaaaatcttttaaaattctaatttaattaaaatttgagagataatcaagaattgtttgaggacaattgctaagaaaggcaaataggagctactagctaggtaaatcgatgatgtaacctaatattatttggagataggagttttaagcatggcttagattgagcaattaatacttataataacatgcatgttgttaacaataaagattgtgtctggcagaaaagcttagtttcttataacaaaacgaactaaagtataattctatattaagtgaaatatccacatttaatattttattgaatctcagataaatcgtctcttaaaaacaacacatgcacacgtacgtgagacacagtcaagtcaagtcaagtctatggtcttcaaaactttacacaattagatgtgtttggctacacacggtgtagtggaaagtagaaaccgtgtcatcttttaaattagcatcctctaactaccctagctacagttccttcacagaaattaaagtgaaacaatatatttaaatcttattatagagtgtaaaacttgagtcgctccactaacttggacagtactagaagatcgatcttttaagcccgtttgccaataggctctcttctcatccagctttttagttcagtcagatgggattttgctttaatttgtttactcggtatactttccgtctattcaggtttgcctactttcttttatctttttaaagctaagtgcacaattttttttcttaataagttttaattattagcttgttagtttttattgggtgaaggaatcaaacttgtgattttttctccttctttcttaatcacttaatcaactttatatttacaaacaagagaacatgatgctagcgacgattgagagacggacaattgtattgatttgtagtaagccaaattacgcgttaagtgcataacgtagaggggtcccgtttcgaaaatgatagtaaattgatggtgtttcatggttaattacatccccaaaagattatactacctttgatcctttttataagaaataagtgagaatatgttttgcactatatgatatatgctactgctacatatgtataatttttttgtgtgtggatgtgcgtataaagatttgaacgtagaaactcacaccactttttgatctaagaccccaaaatgttataaagaccatcactgatatgaaactttctttcactgaagaccctaccgtcctacattcgtactaattaaacttttctttccccatgtgcacaaattttttcttcctttacttcttttgaaaccatgacctgcttcaacctagtggtgaatctcattctataatagataatatggttttctttctaatatctccacgccaaccattaaaagaattcgtcgtaacggttttgtcaacatcatttaaaggtagatttttagaaattgaaagtgaattgttttaggtaaactggaaattatttttttttatattaaaaaggaaaagaatacctttttacattttaaaatataatcaacattttattcttttgataaattctacttttatttagttaaaatcagctcaaagaactgatactaacataatccttaatcacatgatctaatttacgagaaaggtttatgctatgctttgttcacatctatttggtcgattagccttgttcacatgatctaataaattattaattatcttgtattttagcttcaagtaaagagccaaatctgtttaaatatatgaatctatctacattgaatgcagtataatttcttgcccggcctctctctgtgtacattttttggtacaactctctctctcgatctctctctctctctataaaagtttattaactatcaaaaagaaattattataaatataatttaataagttaataaactaaaaatataattttttttaatttttaatattctgaagatgataaaaatataaaaataatctcaatcataaagcccctaaaatctcattatcttaaaaatcagaaacaataacatgttcatattatgaaaaacataaataattgtatggtgcgtaacagattaattaaaaaaaataaaaatcaaataatagatatgggttttatcataaaatatttataattatttaaatgaaattcattttttatttatctatcttataattataaacatagttatattacttatttatacttaattatcctctctctctctctctctctctctctctctctctctctatatatatatatatatatatatatatattcatcacttgataatcattttttttcttctttttatttttaatttttttttccttgagggaggtccaaaggccactaggctaaagttctacgttcaaagctaacgcactatatcatgccataataaaggtatacaacccaaaggaggggaggatagggaatcaccataagcaaattaatgagtgtgcaagattccagtcaacaagcgcattacgtacacttctcttaaagtatggctaacccaattaaacttgctaggtcctacaaagttaaggttacccatattctcatctgattaatttatatatccatatatcaaccacacttaacacaattcagtgattcaccatagtcaaattacctatatgacattaaagattaaaaatttcatggttaaataattaaaatttaacatcaggtttatatgattagagattttttaatggctagctcaaggatttaggtggcacaaagaatttgaaaaggaccaaataaacacatgtaatttacaggaaaagtgtattattactatctaaatcaaatagataaatgaacatatatatacgacagagagaaaattataattaatataagtatataaattatacataatatgatgaaaattttagatgaatgaatgcttatatatttgaattcgagggattgaaaatacacaagatgcaaagatgtgaagttttcatggtaaaaattattatcatctatagagaaaaacatgaacaggttaatattgaattacaaaggtaaatatttttagtttttatctcattaatttaaatgaaaacttttaaaaaaattatatctatgccattttttaacatttttcttttaaaaatatgacttttattattgttttaattcattttttaagtttcatatttttttttacctttattgtttttgatagggcatcatagcatatctacataattaaagtatatattcctgcaaaattcatacatcaaatgtctaatcttaagcttgagggttgttaaaaaaaattataaaccttaggcgatatatcatccttccttgagttagatcaatccattcctaataatattattgttaaagtgaaataaattttaaattaattataatatagataaatattaataaattgataaattatggataattttaatttttcaatgataggaagaagtattaagaagagaaaattctcctctcaaatcttggttgctatattacttgtgaatcagccatcattttattgtctacaatatttaatacaaaaggtacaagattaactagtcatagtacacataccacactaattacagtacagcatatttactcccttgggcacactagtcttcatgaagaataccaacaaaatgacaaagtcaaatcatacaccacactaatttcagtacagcttatttactctcttggtgtttacactggaatttggtaaacaaccgctagtctaagttaattgcttgcgagatcaactagtgaatctcaggagcatgtcacttgtgtattttgcgtttaaatgtaaagcttttgaatgttcatcgttgcaacaaacacttactggttcgaaatttgcagaaagtaaaattgtttaacagaaatcgaaaggctggaaataactaggcaaggaaaggaaaattgcagaatgtaaaggctcagcgagttcattcgatcgaatgaaccatttaaaatgcaggaattataaaacgaaacgtaaattgcattcgaaatgtaaagtttacaaaaacttaaaatggttcacaaacaaacatacattctccttgtgtactcgtttctctctgcgctggatactttgagtgtataaggattctgtagaaatgatttgcgaccctcaaaaactaactaaaactgctatatatagacattcgaaaataaactgccctaacggtcgaacattatccgaatgccaagtgtcctgccacgtacatcttacatgcacataactgctccttagaacggttatccatcttgctcgaagtcgaactggtttagtgaagatttgttcagaaattatgctaagtccagaactcttgctgcctcgacttcgactcgtccatacaccagttcgaattgcccaataactcgaagtcctctttcttgtcttagctttgtacttcgtaaatactcctttgaacctgggaattccttcttaaagactctcctctcttttcgattcgagcaggtcctggccagactcttgctctgtaatacgctccgaacctcgagacgacatccaatgcatacttagaacatattttagctcgtcgaaaatatgggctaacacttggacacactttatatatatagtcttcaatctactagagcatacgaaaaatacaaacaaaaccaacaaaatgataaagtcaaactcacagaacaccatatttactccattgtacacactatagtcttccatctactagaacatgaaaaatacaaacaaaaccaacaaaatgtcaaagtcaattaatcatgcaccacactacatgcagtaaattaagcatattcactcccttggacccactatatacacacacacacatatatatatatatatatgtgtgtgtgtggtcttcaatatactagatcatggaaaatacaaaacaaaaacaacaaaatgactaggatgtcttttgatcaaacacattctaaaaattcacaaatttagcagatgacacagccattatgatcctcttcgaaacttgtaccatagtaatgttgataactatacttaggtggtgtcatctgattataaaggggatagccttcagagatcagctcgagaggaaaagttacttttggtgactcgatcttcttgtcctctttttctggctcaaccttcttgttgtccactgttgctggtccaactgaaactatttcagtatgacaccactttcgtagcttggacactacactcaccggatcaatgtcccccaataaaatcatttttttgtctttcactttaacagaaactaattcaacacctgaaaataatttcaaatacaattttgttagaaaaacattgaatccttgactatgtgtatgctatggattttgtttcttggaacaattaacgcatagttgtagtagagtgaagattttgatatatacctgtaacgccagatgctatcttcatagcttttttcttcatcctatcgtcatgtaaatccacctttaacactactttctgctacacaacagaccaaagagctgttaagaaccaacaattacttgttcgtctaaaacatgcaacgaatagttaaatgcaagccctagtggaaactgaacagtgtagagaaaactcaagaaatgggatccatgcattgattagttgaagaggtaattaagtagaggaaataaaagagattcatttcatcccatgagaatctagttctgaccttcattgcaattaaagcttgcttgagagagccaaggaataattgtttggtgacaattgcaaatgaagttgtaatagatatagctgagattgagcaatatttatagacaaaagataaagatagagagaataaagtagaagttatagccaattagccataataaataaaattaagatgagaatacatgtgtgtctaggactatatatctattttttcaggtctccattcttatactttcctctaatttgagtactttcatctagtaaagcggtgaactttattctcacgatttgcattatactctattatgctttcaatattaagaatggtttaacattattttttatttttttcaatctatcacgaattttcaataactttaattaattctaacttgaatttaaaattatacgttaaaaagtatttatttattttagaatttaattatatatttagaaatagttatttattatatattataaattatagttatataaaataaacatttattatgtgtaatgtgtaactgatcatctttatttatgtttttttcggtagaaaggacaaaaatagaaaagataataataataataataataagcagaaatagataaagtgaaactaaattaaagagtgagaaatgttgaaaaaaaatgataaataagaataaataaaaaattatataataaaatccttaattttaaagttatttctattctaaatctattaaaccattcactactaacttgtttttattagctcaattatttgaatctcttgaaccaaccaaacattgtctagttattctgaccttcattgttgttaaagattgtttgtgagagctaagcaagaattgcttggtgtgacaatttgcaaatgaagttgtgataagtgtggctgagattgagcaacatttatagtagcatgtcgtgggagacatagtcaagtcaagtcaacccaattcaacatatagtatatggtcctcaaaactttagtacaattttgtttgtttatatagtttacgcgcgccggaaaccgtgtgatatttaaatgttgcacgctctaacgcggaaactgtgtgatctttaaatgttgcactctctaactatcctacagttcctttgtagaaagtgaatcaaccaaactttataaaaaagtgtaatcctttaaggctttcttatttctttttaatcatgcgtccggtagggaaaaaatgatagtaaaatgaggtcttcaaaacattaattcaattgtttacatgcttatcaaattctcgagttaatttgtcaattcttacgaatttacaaatccatttgtcatctgtaaattaattcttgaataaatttttttttcaatatactctgggtaaattctataaactttaagtaaattcggtagactttcgagtttaccactgagtcaacgagttaacaaattaaaaaaattagatctaaatgtaagtcattttttattgttttatgtgtgttagtattcagcatatcttcatttagtatgttattctcaaatacaaaattttcacctttaataatatcaaactcttattctctaataacatcaaactctcgatgagaatgatctaccattagtataacatctacaaattattgtctactactgatgtattattactagacttggttatttaaatattctaaactttatgatttactactttgttttattatattattgaaatatttaattagcatgttatttatagatattttgttattatttttatatgaagtaaatttttacgagtttacgagttgagtctacgagtcgagtttataaactctcacaagtctgcctaaattctcgaggttgataatcttaattatttgtttacaataattcacgcgatagaaacatattgtagtgttattatctttacggaaagtgaaccaatagtgaaatctaataataagtgtaatcattgaacgcttttcttgtatattttggggtccgactgagaaaatatatgagagtctagttctgaccttcattgttgttaatgcttgcctgggagagctaagcaagaattgtttggtgacaattgcaaagcaaaaggcgaagagaagtaacaacctatggcttttgttttgcaaatgtagtacttgtgatatgcttggctgagattgagctatatttatagtactatagtagcatgttatgagacatggtcaagtcaacaagtcaaacccaagtcaactcaaatagtatagtcttcaaaatacattatagtaattcacgcggcagaaaccgtgtcatttttttttttaataacagaaaccgtgtcatcaagttttgcgtctgccctacatagttccttcacggaaagtgaaccagtgatatattacaaaaactgtaatcattgaaggcaattttcatattttgggttctgaaatattaataatgatgatgcagttgggaaattttggagattaattgttttggtagctggcaatgaattgacttttgaaagttatcccttcttagtgttctcaactataggaaaatatttaattagtctccgtcttagtgctctcccactagctagtaattattccctcatacatgttttgtatagcctgaatataaattatttctagctattaactttcttttccaaagtccacaaaaaaacacttctcttgcaactcaaacacaaaagtcatatgagtaagtctttttctttgcttcgatgcattctatcaacctctagttaaaaaagatagatagaattttttttaaaaaaattgatggcgctttggaagtgctatgtatgcatatgatatctatttaaagatagtccttgtgaagaaccacctaacaatctcccgctgtggattattggttgcaatagcttaacaggtttggtcttgaaaactatggcaggtggaataggggatcattgtatttgtcgcttgaaaattgagacttttattgtgggagtcgttgtctagggaggtggttattaatttactttgctattgttgatatgattttgagaaattatgggagcaaattgtggtgtgcattaatttgtaatcattattatcccctatatttgcatatttgcaggttgggtgtggagagatttttgttggaccatacattgatgtaacaaaattatggtacttttggtaccgatatataaaaaaattttgctgataaaatgaacagcaccacttccatttccttaaacaactcttcccataataatcaaaaaatttgtttgtaatgccgtaataatttttaattaccaaaagtgaaccaaatcaagtccaacaacactccagtctaatgcatgtttactcccttcttttattttgaaaaatgtaaattatattaaatcgaaaatgatacaacaataaacaggacatatccgcagctagaaaaaaataaaagtctccttaatacaaaaaaagcctaaatcaagatgctaaaacaaatacaccaagtacgtttgtctatatatacaagaagcatgtttactcccttaattgggcacacaatggtcttcaactagataatgaaaaatataactaaaaccaacaaaaatgactatgaagtcttttttttatcaaactttctaatattctagaatttagcagatgatcacgcagccctaagactctcttcaaaacctctaacctagtaatttgaaccatacaatgttggtgtcatgtgataataaaggggataggcttcgtagagaggaatagcggggtccttctccttctcctcttttgctggtccaaatgaaattagttcagtgtgacaccactttcgtagctttgacactgcactcactggatcaatctcacccaataagactagtttcatgtccttaacgtcaacagaaatcgattcaacccctgcaaaataattagaaatgcaattttgttcagaaatcaaatgaatcattcacgctttgtgatatggattttgtttcttgaaactaattaaagcaagttgtatatagtagctagagtgaaaaaatttatttacctgaaaggccagatgctgtcttcatagcttttttcttgattctatcattatttaagtccacctttaatactactttctgtaacagaacaaatatcaaagagctgttaattaatttagactcaaaaattacttctacatctaaaacatgaaattaggaaatagttaaatacaagtcctagctagtggaaacaagctagacagagtaaagctctgagaaaactcatgaatgcaattcgtgtatgcatgcattgattgggggaagaagaggaaatattataaaagagatgggtttcatcccatgagagtctagttattctgaccttcattgttgttaaagattgtttgtgagagctaagcaagaattttttggtgtgacaatttgcaaatgaagttgtgataagtgtggctgagattgagcaacatttatagtagcatgtcgtgggagacatagtcaagtcaagtcaacccaattcaacatatagtatagggtcttcaaaactttagtacaattttgtttgtttatatggtttactcgcgccggaaaccgtgtgatatttaaatgttgcacgctctaacgcggaaaccgtgtgatctttaaatgttgcactctctaactatcctacagatcctttatagaaagtgaatcaaccaaactttataaaaaagtgtaatcctttaaggctttcttatttctttttaatcatgcatccgctaatacaattgtttgcatggttttcaaactcaagttgactcactaatttttacgggtctatttgtcctctgcgtgttgactcttaagtaaactatttttttactataatctggataaattctataaaaagtaaattcggtagattatcgaatttaccatcgagtcaatgagttagcaaattaaaaaaaataaatcaaaatgtaagtcattttttattattttgtgtgtgtttagcattcaacatgtatttgtgttattctcaaatacaaaattcccacctttaataatatcaaaccctcgataaaaatgatctaccattactatggtctctacaagttattgtctactagtgatgtattattaatagacttagttatttaaatattctaaactttatgatttactactttattttattatattattgaaatgtttaattaatatgttatttataaatattttattattatttttatgtaaaataaatttttacgaatttacaagttgagtatacaaatcgagtttcataaactttcacaagtctacataaacttttaagtttgataaatttaattatttgtttacaataattcacgcggtaaaaatctattgtagtgttattatctttacggaaagtgaaccaataatgaaatctaataataagtgtaatcattgaaggcttttcttatatattttggggtccgactgagaaaataatcattcatcttgctttgtggttatacccccgaaaaataaaatttgggcattacaatgggacggatcaagtagggatctagttctctctatcgcaaaagtggaacagattggggtttagatttaaaagtgacaaatttagaatttcaatatccattatcatttctatcgggtattattaatttcggagaaactcgtaggttacaccattttaaataatttttaattgtatatatatatatatatatattaaatgcgcaaagaattggataacaagctttccaagttggccaaagaaaaaaattggcagaattgttcttcaagttcccagtgatgcaagaaggcatccgtccaatagaatccgatacgattggcaagaaataaaagatttttaagttttataattaattgtcaattataggatatatctttgatttatcatccttctataaattgttttcagattggtaggttttctgatatagacatgaaaaatctctgttgatatatatcaaatacttgtttctctcttaggaatatgctatacggtcatatgaattgtcatatttgacaatggggtgatgagatttaaagtatcctattaggtattaggctctgatttttctgcacatctatcttctttaatgataagaaacttaaatagtttttaagtcccttgcctatgacaataggcatcgataatttattagtcgacaatctaaagttttttaattgactgattatattttgacaattcaaaattttaaacatttaattaataattcttttttttatttctcttcctatcacattacatcatcaatcaaatcaattatttatattttttttctttcaagttatagataactcaaggttgtctaagaaatatattttttaacttaacttccaaatacagtcaatcatttgatgtttgtgtcttgatttaacaatgtctaatttattgaattgccaaaagtaaaaactattatggttttattgttttatcaacaattgttttatttcaatttcggtttcttaagaatctgatttcataaaaataaccatatattttgctgatttgatgctatagaaaataatcagttaggtggtgaggagataaaagtaacttgccctttgtttgagaacagcagacagggtcgcacaacctcttttcaaaggctctgtctgtgtattgatggtaaacaaccgaatggataatggagtggaatgaattgaaatgaattaaaaatatcattttattggttgaataatttacaaaagaatggaacaaatattccgttttatcatttcgaaagagaacggaacacaataaattacaacttttcatttattgtattacccttattttaaagtaactacctattttttttcttttttctttttcttttttatcatggctgcctgacgtgcatataaacattttttctctttttttaaagagaagttaacattataaaagtattaatttatcttgaaattctctattttataactactgtaacttttatggataataacctgcgagaataaactagttcctaagactacaataattatattattgtagtatttaacaggaaaaaaaaagtattataaaacgtgatggcagctagaagtagattaaacttgtgtcatactcattcacattccttaatatgctcttacttccaacaaactatactaacaagatgtgtgttgctggaaaagccaatgaaattacaaaggtatacattatactatatatcaaaaacccaagtagctagaaacttgtctgaatttatcaaaaaagttacaccaccctctgcgaataataatcctaataatattctaaaatttagtagatgacacagccactatataagattctcttcaaaacatctaacctattaattttaactatacagatacagtggtggtgtcatatgataataaaagggataggcatcatagagcttgagaggaacaggttcttttgctggctccactttctctttctccttttcctcttttgctggtccaactgagactatttcagtgtgacaccactttcgtagctttgacactgcactcactggatcaacatcccccaataaggtcattttcttgtcattaatgtcaacagaaactgattgaacccctgcaagataattacaaacataattttgttatgaaatcattgattccttgatgctgcagcatgatatgtatttggcttcttgaaacaaagcaaagttgtagtagggttgaaaattttgatttacccgaaaggccagatgctgtcttcatagcttttcgcttgatcctgtcatcatgtaagtccacctttaacacaattttctgttacacaacaaatatcgaagagctgttaagatccaataattaattgcttctacatctaaaacatgaaagaaaacagttaatacaaagctcagaaaactcaagaatgtgattcatgcattgcttaggggaaggagaggaaaatatgagtctagttctgaccttcattgttgataatgcttgcttgtgagagctaagcaagaattgtttggtgacaattgcaaagcaaaaggcgaagagaagtaacaaactatggcttttgttttgcaaatgtagttgtgataagcatggctgagattgagctatatttatagtactatagtagcatgttatgagacatggtcaagtcaacaagtcaaacccaagtcaactcaaatagtatagtcttcaaaatacattatagtaattcacgcggcagaaaccgtgtcattttttttttaataacagaaaccgtgtcatcaagttttgcgcctgccctacatatatagttccttcacggaaagtgaaccagtcatatattataaaaactgtaatcattgaaggcatttttcatattttgggttctgatggaaaatgatagttcatcttgcttcgtggttatattctcaaaatattaataatgatgatgcagttgggaaattttggagattaattgttttggtagctggcaatgaattgacttcgaaagttatcccttcttagtgttctcaactataggaaaatatttaattagtctccgtcttagtgctctcccactagctagtaattattccctcatacaagttttgtatagcctgaatataaattatttctagctattaactttcttttccaaagtccacaacaacccttctcttggaactcaaacacaaaagccatatgagtaagtctttttctttgcttcgatgcattctatcaacctctagtttaaaaagagagaatttttttaaaaaaattgatagcgctttggaagtgctatgtatgcatatgatatctatttaaagatagtccttgtgaagaactacctaacaatcttccgctctggattattggtttcaatagcttaattattataatttaatgataaaataattttataaatttaacgatagaattaatttatctcactttttatacatttagaaattaaatttatattttttatcttttaagaatcaattaatttatcatcatatcacactttgataaataaattttgttatttatcctaaaagaaaaggataacgctcatcacttttatatctttgtgattaacataaatctgaatatctcttttgttgttaaatataaggaccaaagtgttattcctcaacttatttgacattttcttttatatcaaaatctccttaaaaaacttcgcgagctaaattaagtttggcttagtcttccatgttattttttattcaaggaatacaaacggtaagaaaaccctctagtcatttttgttatttttttatttagaaatatctcattattttgttaattcatcttttttgtgttcacctttttcttatttttaacatgatatcaaagtctattcattcttgatgttcaattatccagcaaaattcatatatcatcctcaatctaaagctttagatgatattttaattttattgtcaaatgctattaattattaatttgttaatttttgttagtgggatgaattcgaacttatgacctatacacctataccatcttcctccctctaccccctccccttttaggtgtatactgatcatatttaactaaatttatcacttaatccaatcaaagaattttaggataagttgactttgagaaatttaacttcaaaccacagctaaaattaatctgatcatgaacggttggatcaatgagtcataatatttaaaaaaaattattttgtaaaatttaaaattcaaaagcatatttttctcatattttttagaattttttttataaaaatttacaataaaattacatacaatgttaaatttgttgcacaaagaaatttataattttctcatattattattattattggattgggtcatgagtaaaaaatatacaatttgttattcatcctatatatgaataaatctaattaggtcacatcaattttgacccaaaccccaattatttaggttggattgggtacacaaattatttggacccataaacaccgctatcactcttcttattcaaccaataatcaaccttataactccaaaacaataaataaagcattccagcaaaaagaaaacaacaaataaagcttgagagggtatttgatactccttatatgacttagacaattctttattaattttcgagtcttcgtgaattggaacaatatccatttttaataatataattattcaggtgaaataaattttaattattatattaatagtaataaatcgaataactatagatgattttaaatttcaaagtaatggaaaaaattaaagtattaagattcgaatgtgttctccactcaaatcatttgttattactcgtgaataacccaacaaaattttgtcaacatttacaatatgacaaacaaagtccaatcatacactactaactattacagtactacatacatgtttatttactcccttggacacacgatcaccttcaatatatattctaatagaccttgcatcaaagaaataaaaccaacacaaattactacgatgtctttttttttatcaatctttctaatattctaaactttagcagataaaagtaattttaactatacagatagagtggtggtggcatgtgatagtaaaggggatacgcttcgtagagaggaacatgcacttctgcagggtcctttttcttctccactttcttagctttgacactgcactcactggatcaatctcacccaataagaccaatttcatgtctttaacgtcaacagaaattgattcaattcctgcaaaataaataacaaatacacaattttttttcaataaatcattgattcaccttgatgctgcatgcacatatatgatttgtattttgctcagtggttggcttgatttaagaaattaagtagagattgtcttctttttttatcatttaatggataatatatggtacttcaatgtttatccattctgtggcaaattaaagtctatcgaggaagcgtggtctttctgtactctcttttctaagtcattgtcattttgtcacaactcaaaagtagtgtttataattcatctcattttttaatgcggttgtcgcaactgaaacgtgacgggaacctagagttgttgattcgcactagttcgatttattgagctaatcaatcacggatcaacattttgttgttgtggttgaattgggttatctaatttaatagtgaactgaaattttgtttagactagcccttgataggttgcgaaccaaacaattatcaattatcgatccatggatcactcttttttttttaaactaaccttttgttcatgattgatattgagttacatgtaggtaggtaataaagtatgataaaattaattacataaattgggtttttgcgagtattaaaaaaaagtttattctactgttgaaataaaaactagcaaaaactcattttcccttcttttagtattgtcaattgttcatttggaaatttgcagaaaaaccaatgattcttctctccatcggaacaatggaatcttatgttcattattaaacttgttgaagggataaaataaatttaaaatatatctttttaattagaggttaaatcaatcatcagaagaaaatgattgaattaagataaaaattaagatatattatgagaaaataaaactttcatcatagagaggcaaatgacattgtgtgaacatgtaccatcaccgtcagcgtgttggcccaagggtaacatcgccgttgtagttctgttgagatcttattctttcttcttcgtctccatttgtactcttatatgtgttgcattgccattgcactgcgtttagggaattacagcgatatatagttgaggcaccaccaaattatagcggcatgcaccgaccagcatcacaagtttttgcgggtttttctttcaaccctatacgatactttataaattatgattatgagtgtgtgagatttactaataggattcttctgttaaaagtgaaaaaggagaggatccaaatccaaaacaaactatgtgaccttgggtttctgattacattagaagatacatagaagcaagaaccaagttcagactaaatttattttttcataatttaattttcattgtaaataaatattattcatttacttgaaaaaaattatgtatttaaaaggagtaaaatatatatttttaagttatcttatattgtacatttaattataggttattatttgtataaccaatgaggtagttaccttataaggtgataacaccatcattacacgtaacctactcccaaaccttgatttgatttcatggaccattttttataggctttttttaatatatatttttctacttaataaatattgcatactattttttcgctcaaaataagtgttgtttggtaacttaacttacatattagtggaataaactattgagctgcatttattgcacagttaatagatagcatataatgatttcttcttcttcttttttttttgacaaaagcatataatgatttcttaaaaatttaaaatagttctttttttaatgtgagtttataatttaaatttttattttcctttaaaacatatataactgtatagtccgttattttttttagtgaaatatagtctgttatatttattgtacattagtttattaatttaacattttataggacatttgtttcataattgcaaaaagatcttctgcgtttttttaaaattgcatgaaatctcagttcttaattcattctaatattttggataagttgttatcgtatatacaattgtctttaatctatctcttttccatgtctattgagtaacacttgcgtataagtttacatacaaaaaaaatcgctacttaacagtagtttactaacgtcggttattaatacagtcattaagtgtattacaaaaatttagtcaaaacctcccggtaagtgacatgtttaactgacgttaaatttcgattttttgtaatgttaaatgaatgtcatactcttcatattatttcatatttaaatatatccaaaacatcaataaaatgtgtcaacttattctataagacaaacaaaatagctacatcctttcaaaaatacattattgtcagtaatgtcataagaaagacacatacagaattaatattttgcaaaatctaatcataaaaattaagaaatgatgagatttctatgaatttaaattacaagaaatgagtttctttgacttaataaagggtcaagtgcatatatttcaattcttaatcatcaatgtactagacctttatcataaaatgactatgttgattataatgcatttcaaaatcgtattttggacttctaattattgtgtaatttgttctattttttcacatgtattacatgtttgaaaataatatttttttatcatatgagatttaacaattaaaataatgataaaagactaatacgatattgttttctattcttagtgcatctcgatattattggagaagttttgacttttttaaatttattattcacaatgttagaacacattggattggcttgaaccaaataagattcataagggtttaatttgttgagttatcggcacattcttgcatacttataagaggcaaatttacatatagtgaaaattaagaaaaaatgttggaattgtatgtaccaaattcaagtaaaatgatcctaaccaaaaatctaaataacgaataaaattaaatgtataacaaaattctaaatttaaaacaagtatttatataactttatacttcttagtacattctgttactattatttttttatttaaaaaaacaaagatgcctctatagctcgtctatatctagctataaataataattggagtttggaatctcagttccaccttaaagactcaattcactaacttctccctgctgacacttgcccacccatatatacatagttgagttctttcgtgatggtaaaactctacaacaatccctccttggtgactgcaaaaacaaatttacgttcagttaacaagaggattcattaatttcaatatatatgttgataaattagtaaagtatacactttttaatacgtataatgaaaataaacaagagatgttggtgatatctcattataatagtgcaagtttcaaaacattcttaccatttgccaacgaagaggatttggtctttttgaaattataatggaattgattttctctggtgactccattttccaagtgcagtaaggaggtctagatttgaaacgatagtatgtaccaataatttgcttcctaactggatcatatcgtgttctgttcatgtagaaaaggaaagctttctgacaagggtttttatttgtcacaggtcttgtgttgaatgagtatgcagtgtaatcagctcttttataccaatttagaaaggttcgtgttggcatctccaactctctaggagataatactcccctcaaaacttgaaccacatagccccatgaaatagagatggtccaatatctcttcttgtcatagcaaattgattgttgcattacgctacctgagtcttgcttaacagatttcattagttgttgtaaggattgcactcgattcatcattgggaatattggttgcaccacatcaagatggtgcaatgtcactagtggagccacaggatgcgcccccagaaggcctaaaaggtccccatacacatcatactgcataagcaattaaggaagaaatatacatgatgatgcaaatttcagattcttcaataaataaagaatcaaatcaccaagcactcctaataatgatattattacttgacatacaataaaattaaataattaaggcttaaatttatttttcatactgaaaccaaaactaataaaataataaacttagagaaactaaaaacatatttaggtgaataattaattacctggtgaaacccaggttccttagttaatggaactcctagctccgccatgcaagcttgcattctatcatcacttccatatagagcagggtagcgttgaatgcaacgatcttgcatttttgcgagctccttggctaatggatagcttatagcaaatcctcccccaccatatgccatagcataagagaaatgaatgttttgaacgtggctctcagatgagctcccaacataatagaattgagtgtggtcatacttagaaagaattctaaccacattatccacaataaatattgtatcatcatctcccatcatgaaccatctcacgtcttccattccaagcttcaatgtctctgttaccacccttgaaatcctcaaagcagatctttgcccttgtgtatttgtatatttaaatttagaggtgtccccagaaattcgaatctctggtaacccctcatttgcttgagtcctcactttgctatctaaccacaccacccctcttgtttgattaggcttccaccacacttttatgtattcttttcttatgtcccacaaattggatgaagcagctatcccaaaaacaatgtgtttgagcttcgtgtcttgtctttgagataactggtcaagggatacttcttcttcttcttcttcttcttcttcttcttcctcctccttttcattgttgccctcttcaacatttgatctttcaatggtttttgtagttgaggatatattaccactcatctcaagatgttcttgggtggcttcatctaaatgaatggaggtagaacaatccttcttgaccttggttaagagaagaaaatttgaagaataaaggatgtagagaacaatcatgattaagatcaaccaagtgatgatgcgttgcttggaagaatagtacatttggttgttgtttcagattcttcaatccctcagattgttgttacactattttttactcacaagtgttggaatggagaaaggaaatcatgaaaaagagattcaaactcagatttattcggatcaccctgaaggagagaataagaaggtattactactttgtgtttcttttggtgtctgtggttctaagcgaaatttgttgtgacacgtagcgaagttaaatgcgattcatatggacactatatatgtttcaatcaatggtgaaaaatttgttgtaataggatatatgataacattgtgcaaatataacatatatcactaatataatttgttacaaacttaaatagagagaatatacaaataaaaaaaatatgaatttaattaaatattatgatatataaattaattatttatatggatatatgttaagagacttacaatatgatataattcaaatcacaaattggaaagattataataatagcttttaccagctgatggtttatcctatcattattattcaatggaatattatttttaatatatcctttaacgatattaattataattatgatatataatcatatattaaaaatgacattatactaacattgaataataatattatattgaaaaatgtcatatcataatttatggaagtatatattaattgactttggttattataatgaaatcatattatatatattaacatggttatttcatatataataattattaagaataatattataatatattattatgtagtaattaatcaatggtggtcctggacacaattgaggcgagcgacggttctgagtcccatctttagagggcacaaaaaatattatttagttgatattaatattaagaaaaaaattcatataatcattttaaaattatataaaatttattttaaaataaataatttttaatgaaatttatttatggaaataattaccagtaattagttaaatggttagggtccgagccgttgaaggatgcttttccggagctgtttgcaatttcatctcagcagttggtgtctgtaggaaacacaggttcatggaggagagaccaatggacgtggggcttgacttggaagagacagttaaatccgaatgaggaagagtcacttcactctttggagaccattctggttgatgtgcatctagtggcagaatctcatgacaggtggaagtggtccttacacaactccaaattattcattgtaagttcttgctattcttttgccatgtctttggtaaatcaaacacaaatgaatagcgatatactggatatactatctatagtttggaaagttcctgtgccatccaaagtagttttgttttactggcagttactattggatcgattgccaaccaaggataatttaattagaaggaatgtggtcattaataatagtaggtgctctctatgtgattcttgtgatgaaaatgttgtacacttattctttcactatgatttttctaaatgtatttggaaagaaattttgagctggattgggattgtcgatgttatagcagtggggggagttcaacatttttgggaatatgataggctcctcaaatacaacactagcagaaacaaggtgccctttatgttttggttggctactttgtggatcatttggcaagtgcgcaataatagcatcttcaatgaggaggaaaaagacattcccaagactatcaatcaaattaagcacatatgttgggcctggttcatgggaaaggtaggagggataggtggatcgaatatttcagattggtggaattcaccttttctatgtagtaaagtttaaaactatctcatctgagacattcttgtaatgggttggaatactcctagtgctccttttattataatataaattcatatttcttataaaaaaaactataatatatttagattattatgatcatctcaatatattgatcataatataaacatgtctaaaaattcgtaggactatgttgtctgtctttcttagttttcaatttccaatatctagttgttaactgttcaaattaaatgaatttcaaacttatcactatgttagttttctcagttgttaatgttagataatgagaaagtgagtgacttagtgttattatctgttagtttattgggctgagaaggagagaaatcaaggtagattacttataaatttgagggaaggctgagagataatttattatttgtgattaaattatgtaaaaattgtttttaaattgtcatattttttaataaaatgatttggactggatcggtttgtaatcatatcggattgaacaaaatatgaaaagttgtataaaagtgattcgattaatcaaattatttttataaaattcgttagttaaccaaaacatttttcacccaaatccgatatttttataaaaaaaaattcaaaatttagtttgaaatcagtttcattcttaaaatcattttaaaactaatttagttaaaagctgattttttttaaaaatagttttattatttgaatttaaaattaaactagttaaaacaatttagaactgattcagttcgtttttttttatcaaattggcttttcacacttgtatataaggaccacatattttttttaagtgtgtttgaaagaacgttaataaaattgattttgtaaaattgatattgaagtaatgtatttatatttgaatgttttaattataaaatcaagttatggatataattgagtacaaaattttatattcaacggaaattactaaattacttcattccttaattaattataaatttttctctaacataaaaccaaatgtgtaaaaatatatttaaaatcaaatttaaattctaaatcattgtttttcaactgaaaccaaacatatatcggataaattgtcatattaatttccaataattaataattcgtaattttgttctcccatttttttctacaactttagttcctaaatttttaaaaattgataattttgatttttagcatatattgactgggttattttaatagttgactatcggtattttgatgattaataaaagtctctttaatgtaataaaaaaaattatatttttagtctttaaacagaaatttaatcggtccttaaacttttatatcatcaacgtttttaatctcttccgtcagatatgacagttaactactgatttttaaattgacgaaaaatacaaattataaccttttttattctgctttttatatatatatttattttgaagtgctgtattaaaatgtactatatttttaaatttgaatatttctctatatttagcgtcagttccgcacaatgcacctaacatttgttgtcacataaatttggtatacgtttcgccacaaatcccgcatttaactctctccctttctctttctctctaaaatctttgaaaatggtatccaaaaacccgaacccgcccgagggattctacttggatcccagtggtggcatgcctcttcctgggatgcctcccttcgcctccgtctccgccgcaaccgctgcgaactcgccggaggacgccgccaagaagatccgcaagccctacaccatcaccaagtcgcgggagaactggaccgaacccgaacacgacaagttcctcgaagcaattcaactgtaatcatgttcgctcctttttttatttttctttttaattttggtttgcttctgagaattcagtggttgaggttaagagttcgattgaagctttggttagttgaattttagtgctcggtggcggttctctgagttgcacgagctgaattgtgtgtgagggtgcgagatttagggttttggggatgaattgggatttgtttttttattagggtcaatgtgttagaatggaaatggttaatggatagggtaaagcttgattttatatgccgagttaacacagtaaatgcaatggtgaattgagggcgtgtttggtgtgataaaatgttttgtctttttgctttccattttcaatgttttcttttttttcttttccatttatgtacgaaatacaaatgctagaaaataaataaataaataaatataaatcaagtgaaaataaagtgtaattgttaatgaaaataggagaaaaatagaaaacaaagtgaaaacaagtggtacttcgatagttagtttttttttttttttttaccaatggtagttattagttaaaaacatgaaattaaaagaaaacatttttttaaaaaaattgaactggcccataagtgtccctttgcttattttagcatgctttcttgttagaatttagaaagtatgaaagattgtgatgagatgctttgatagagagaatatcagaaatgatcttgagagctagtttcttattcattttagattgtttttgttagaagctggaattgatattatttatttcttctttatggtgtcaaattatcactattggactattggttcaaaccctgcatggcttacaagccacgttgaaggagttgagtttgaggtatcaattggataagtgatagtagagtgagaatcttaattcttaaacatggttggaatgtccattattgaggagagagaatggggattggggacattaggacaatgctcaataatttcaatactagaacagcagaaccagaattgcactaaaaactaagttggttcaactgggaaattctattccacataaattttaatcctttgatttcttcaaatacaattgtggttgtcggtttaagcagttgaagatggctttctgcttcccttctgaccaggcctggctcccaaatatgaccagccggactaattggattaagctgtttgaactatttactattttcattctgatccttccacaatttaaaacttctttttccttacaataataaataaattgggaagaataggtgcatataggcccaaagacattggcaatcacaactggaaaaaaaaatagacctgaaaaaagaaaacaattattggactaattaatctaaagagcatttagtatgttaataagatttcctacaccaataatgcctgtattttgacaatatgtttctctccttgggattgtagtaacatagtcatgatatgacacaaaatgacctaaagccaggttagtgtagattcctcttagttttatttgatatgatcatattaggaaagttattacctctctttgtagaagaaaatattatagtaagtagaaataggaaatatatctaggtgaaagacaagagctccacttttttttcttaaaaaaaggagaaggagctagtgagccaaagtgactaaaaatgcaaagctatgtaagctttttgcctttcataatggaacttcccttgaaacatctattaggtcaccagagagaaatcataaacaaaatttacaacaaaatttaaaggttgagagacacccttggaaatttgggcagttttctttagccaaaatactcttcaaatcatcatgctttttatataaaattttggtaataacttgagaatgctgtaaatcatcgcattattatggtggagagctccattgaaaggtcaagacttaattcctatcccttacaaggaatttggtgtttcaaattaaagctagtgtttgtttctcccctttctttatcttggggtcgccatttgccactatcctcactttttttccccttcatttctgttttcaggtttgatcgtgattggaaaaagattgaagcatttgttggatcaaagagtgttatacaggtaattctcattgaacaaaaaaactttctttgcctgaagtgtagaattatctttaatctttctcaatttgagtctagatctgcacctagaaagtatccattctcattttcttgttaaaattgtttttattctcaatgttttgggagggaagtcaacagagccatggcaagaaaaggggtattcactaattaaatgtggttaattggttatgctgttttcaaattttgccactatatcttgctggaaatgaaatgtcaaaagatgggtcttctggtagggatgatttgtgatttgtcgatttcctggtccattaataaaaaggttgtatcttttatgagaaaaaataaacctaataggctaatgcccattttagcccaccatttgacacttaatcttttattattaaactattattagatgtttataaccattgtttatatcatactttgttattcttggaaaaaatgtgacccaaccaactatactaaaagtgtagctgttaaatgcagatccaggaatggtttttgtaatctttaacatgcctctgcatgtgagagcagaaaatgggcaaagcatgataaaagttttataaagaatctactgcactaaaattttatacttttaggtacagagtaaggaatggttttgcttctggcaagaaaataatgcaaaatgcttttgatgacatgctgatccttttgattaaccgaaaaagtgttaacagggagctgtattttatgttagacattatttatgaaagaatattataatgtaatttgatccatgcctccaatcccatttagtgggaaaatgcttggttgtttgttttgattgagacaagtgtctggagctgagctggcttgaaaatctgaatatatgagttgttttaatggttgaagtttcgatataatgtccatgccttaaggtagaaacattagccaatttttaaataataaaaaatttaaatagtttataaattagaaaatttgcaaaattttaaatggttaactatactatttttttcatacataataacttcaaaatcaaatattaagtacttggtattctgatttcaacataatttgtaattatgaaaatattgtttaaccagaagaaaaaaaagtcaatattgataaccatttaataacaataaaagtgtgaatttgtatcttatattactatagcaatacatatttgctaatggctttggatatacagaggtgtggaagagagagaggggggagtgagggagagaggtgagaaaagaggtgtggaatagagggaggcttaaaaaagggatagagaggaagagaggtgcaaaagagaaagagaagggtgagacaggtgcatcacagacagagcatgcactaaaattcggaggtgagagagtttacagtgacactatggcagagaagagaaatttccaaattcttttattttaggtgttagtagaaatcccttcactttacttcaaaaaaatcccctttaaaatttccatcattaacattctctgcatttgatatccaaataagtcatattgatatgtggaattttaaatctgcttaataattgaatgcctctttgaattcctcacccaaacacactgtaatttagtttaaggactaatgataatttctactgactttgtagatacgtagccatgcacagaaatactttctaaaagttcagaagagtgggacaagtgaacatcttccaccaccccggcctaaaagaaaagctgcccatccatatcctcaaaaagcttccaaaaatggtcataatctttcaccatttattttttagacaacttaagtgcatttatatctaattatttataattgacatctggcagctccagtactctcacaagtatccggacgttttcagtcttcatctgctttgcttgaacctggatatatcttgaagaatgatgccccaccaatgcttaaaactcctattatgaacactgttgcgtcgtcctggtcgaacaacaccttgcaaactgccaatttatctcctggtattaaatgctacagttttctttaccttaaattttgcttatattgatcctgtaattttgttcatgaaaagtaaacatgggttattgaatatacttgttgccaaaaaaaattaaaagatactaactactttcttgtgtttgcaacattaaatgtttattccagtgacaaaagtgaataatccttgcagtagcggtgaaagcactcctaaagtgtggccagttggtgaatctaattgtcaagggaataaaatccatccattgagaggcaaggttttagtggttttccttagtagtttcaaattgattttctttgttgattacatgcatgcatggcatttttatggagtgttgttataaatataggttgtgctgaatgtggcatataatgtatactcagtgtgtactttatgacagttgtataataaaccctacactatgtggggttgaattaacttaattttcaatcttggacatggatgattgtcttatgcaccaaaattttcacttgaattatgatataactgaaatgctcaaaattataagctgccagcttttatttgaattcaacggtactctaaataatgctgaaaaattgtatattgctgatattttctcatttggtatcttcaatttatttattattacatttgatggaatcctgtgtccaagacatatcattttaaaatttatgtgcttcatggatgaaaagctgagtgtaatttttttgtgactcatttcatctaaatattcatcatgtcttgaaagttgtttgagtagctttctacaaactcccactttgacccacttacagacagacttgcaaaactccttataaaaaatcatttttttcttgtcatccaagtttcctttttatagtatattagtattattgattcttttatattaattattgtcttgattttttaattaatagttaaatgtttttttcttaatgcagttcttccagattttactcaggtatatggcttcattggcagtgtatttgacccaaatgcaactgagcatctgcagaaactaaaaaagatggaccgcatagatgttgagacggtatgtctatgttcctccactccaatatttgctattctgctcagctagattggattctgttatagatactccttaagttgacattaaagctttatttgaacctgacttattgactagtgtctactacaattgtataaatgactttatgcttgttcaaaagtacttacaaaatgtccttggctgtttttaggtgctactgttaatgagaaacctgtccatcaatttaactagcccagattttgaggatcatgtaagtattaatgcactgatctttagattgctataaatgtctagcatgtcatattgtcatgctgtataagcaccataagagttcattttggtaaagtgcctatctttttatttcattttttagtgcccatatcatttggagtaagattttcatggttgctgttgcaagacatcttttcttctatcctatatttttttttcttctctcctattattgaatttcctttatcatctcagcaaaggaaacaaaagagtatttagaagcaattatcatcagcaaaaacaaaaaaaaaaacaattatcagtagcagttactggttaactccaatgttttgttgctgtcaacattgtacttgtgaaatacaaggcatgtcgagtgcctgttatatagcatttcatttctcatcctactaccaatgtcctatagtactcttattcattttgcccttgagctgggatccatcaagaaacatcaaattcagaggctactattaattattatttgactcatactcagcatattttttccctccatacttcaactgaatcttatatttgctattacatctgaaggttttgacttcaaggtttttttgtttgatggatgcatttgtttgctatcattactgtttaaaacagacgcatttcacaaaatctatgttcagatcgtatattaatttattttggtgtttaaaaaatttgtgactagtatgacttgtgttgtggagttaattggctgaaaagacaccccaattaaatctctaagaggaaagaaaaaataataagggacttgatataatatgatgatcatcctcttttctgatgtacatgcatcataatttatgcagagaaagctgctttcatcatatgaagttgaaccagagagagatgataactatcaacgcggatagacccatgcacgatgagcagttgaagagtgctaatgggatggaggcagaaaatggcttcattttccaccgattggatgcagtcagggtgctattattttccatgatgtgataaagatactgatggtcatggcaaggcaacaaactgaagacgtttgagtcacagctaatttttattctgctctagatttttattgctgttgctcgtcatcttagctatgcaaatcataattgtcatcattcattattatgtcatgtatatatgaatcagcctattaaaaagaaaataataatctgagattgtatagttattttcctagttctttgtaggtctgcacagaacctcataattgtgtactaaattcagcaaacacaaatatttgaacggaatatattctagatttgtgtaggtctgtacagcacctagatttgtgtgttaaattcaaccaagcatcaaatagttgaagcaagaatgctatattcctagtctgtagacatcttattgaatttacccagtttaaatgttttgggtgggcactggatatggaaatgaatcataacgagttaagaacataaactactaaacttgaggaacaattggagcacttttccttttagtcaagagttctgatttaatcaaccggtgatttgccaaaaaaagaaacgtgaaattagcttaggctctcttaagctggtaaaaaagagggagtcttgagcatatttgtatttgagaagttttcccaagtggaactcacttgaagaattaaatttcgttgcttttcaaatttctcgaaatctttaaatggctctatccaaccagaggtttggtggtaatgtagcggttaggtaagttttttttattgaatccgatgattaccaatgggaattaaaattaagcaatccttggagatgtcacgctagccttgtaattgttaattaacacgcacagctcggaagggaataatcacaaaaaagtgagaaatccaaatcaaagaaagacaaaaatcacgtggcattgcaaaatgatcaaaactaaatactagcaaggaagcgtagcagaacgcaacaaatgcatctgtcaactgaacggggtcttaatcaaagagggtaaacaagcttcagaattgaaatccaacaacggcttgattgattcagtaactaaaagttggtaaagagtacctaaaaatcgaagagtgactttctaaccgtgattctggtaaactatgttttccaaaagattgtcttggattctttagaaaatgtttggttagggagttgtaaaactacatttgaagcaactcttgcttttatgttctttttacacgtatctaactattgcagcatcgtgtagtaggttcaactcaattaattgcagcagggaacaatactccactctgttttactcagtcgaatatggattttggctttgacatggtatcattgcataatttcggtgcatgcaaaggaaataaatttatatttattttaaataaaaaaattattcctataatttagaatttttttaaattttattcttacaattttattttttgttttaattcttgtaaaatatattttttcttatttttaaaatgtgttaaataatattttttattattcaaaatattatctacatattaaatacaaaaaataaaaatataaaaaaaataaaataaacacatcttagacaaaggcaaaaaaaaaaacacttaggtgaaccataatgtatttgaaccatattttcaatggtacattagaaggaaggtataagaggcaaagtcagaggaagtaatacttgttctccttcattgatgttatatccagaacaattactgacaaaagatgttatatccagaacaattactgacaaaagtaggtagatgcaacacacagactgacagacacatttttttcacatcacaaaaacttaaaaagtaaaaaccctatatatctcaaaaaaacaaaacaaaaagaaagataaaactaaaagacttctgcatccaccaccatttaacagacacgaaccacaattcatttaacacgagacctttggcatttagtccacttcctccatcttgctctcctcagcaccgtcctcttccaatgggggcatatcaacatcgtctccaccattgtcatcctcatcaatgctaagacccaacttcaacatcctgtgaatcctcgaagcaaatgtgttgggatcatcaaggctgaaacctgaagtcaaaagggcagtctcaaagagaagcaacacaagatccttcacagacttatcattcttgtcagcttcagccctcttcctcaactcctccatgataccattgtcagggttgatctccattgtcttcttgctagacatgtagccactcatgctgctgtctctcagagcctgagccttcatgatcctctccatgtttgcactccatccgtattcaccagtcaccaaacagcaaggagagtcaacaattctgtcagagacaacaaccttctccactttgtctcccagaatttccttgatgaccttgcagagctcatcaaatgacttcttcttatcctctttcttctttttctcctcctcagtctcatcatccagcttcaacccttcctttgtggctgaaaccaatttcttgccatcgtattccttgagttgcccaactgcatactcatcaattgcatccaccatgaagagaacttcatagcccttcttcttgagtctctccaagaaaggagagttctccactgccttcttgctctctcctgtaatgtagtaaatgtccttctggccctccttcattcgtgtaacatagtccttcaagcttgtcaattcgtctccactctttgttgagtggtatctgagcaaatcagccaacttggacctgttctggctatcctcgtggatacccaacttcaaattcttcgaaaaagcatcatagaacttgttgtagtcttccttgttctccgcaatttcattgaacatctcaatgcacttcttcacaagattcttcctgatcaccttcaggatcttgttctgctgcagcagctcacgagaaatgttgaggggcaagtcatcggagtcgacaacacccttcacaaatccgaggtactcgggaatgagctcctcacagttgtccatgatgaacaccctcctgacataaagtttgatgttgttcatcttcttcctggtgtcaaacaaatcaaagggtgccctctttggcacaaagagaatggccttgaactcaagctggccctcaacagagaaatgtttcacagccaagtgttcttcccagtcattggtgaggctcttgtagaaagaagcgtattcatccttggtgatctcttctggctttcgcagccaaattggtttctgcttgttgatgagttgccactcatgagacacctccttgatcttcttctttttcttggaatccttctccttgtcctcgtcaacatcctcaacgtccccttcttcctccttctttggctcatcatcttcatcatcgctgatttctttctcggtggtcttctcagtccataggtaaataggatagctaatgaattcagagtgcttcttcaccagatctttgatccttctctcctccaagtactccaactgttcacaatccaagacatggacattagtaaatttaaaaacaacaaaacatggttaagtaaaaaaaaatcaattacttcaacaaaatacgataatgaatcacgttttttcgataaaaaaaataaaaaagcaaactaaggttcaatataagtatataactaacaaaacaggccaggttaataaatccaatttccccccaaaaaggtcaagtaaaaaaaaaaaaaaaaacacaattttttcaactaaccaaaatttccaacaaccaacattagcgacttgcattaaaagctaatttttcaacaaaacatgggtggacaaataaaaaaaatccaatttctcaacaaaacaacaacaacgtattcaattaatcacaaaacaacaaattggggtttcagtttatcattcaagactacctgatcttccttgaggaagagggtcatcttggttccccttccgagttgctcgccatcggtgtccctagtaacagtgaaagagccaccggcctgagactcccaaatgtactgttcatcatcattgtgcttggtggtaacaatgaccttctctgcaacgaggtaagcagagtagaaccccacaccgaactgcccaatcatgcttacatcagcaccagcctgcaatgcctccatgaactccttggtcccggacctcgcaatggtacccaagttgttcaccaaatctacaacacaacacacaatattcagtcacagaaacataacataataaaacacattcaatccaaatcatcattcgaaattccgaacacatgctcgtataatgtaacgaagaattacctgctttggtcattccaatgccgctgtcaataacggaaagagtcttgttggccttgtcgggcacaagacgaatgaagagctctggctgagcatcgagcttgctcttgtcggttaaactctcaaatcgaatcttatccaaagcctacatgaagccaaataaaaacaattccaaacactgttagaaaaataaagaacacgttgaattatttgaaagacaaatgttaaacatgcccaaaagacattggttaagaaacttagaaataaaaatgcagaaattttttatgctctcctataatttatatagtaaattctatcaatgtaattcctttaactaacgtcttaagaattctagttaagaagacccttattttaagcaatattggtacaattatttcaagagacgatattaaataatgtactatctagtattaaaccttgaaaggcacaattttaaagaattagtttttttgtgttgttctctaatcaaaattcaactatcacctgataaaagcttattctaatggtcacatataatatgagaaagaaacttcaatttttgttaatcgtgtactccatcaatcaaatcaattcatggttcgagaatctaatagaccaaagcaataatgctcgaacaaaaacaacacagtacaaccagtgtcacattcattaaaaaaacacgtgattgattgaatgatttcatgtgctataaaactggtgatttctttttaattcgaatcataaaaaaaaaacagagactaggaagagtgagtgagggataataaaagaggcttacatcagaagcgttgctgatgagttcacgcaagaaaatctccttgttgctgtagaaggtgttgatgatgaggctgagaagctggttgatctcagcctggaaagcgaaggtttcagcgtccgccattgaagctcaaaaagataaccgcagagaaggaacaaaaaagaaaattgcagaaaagagagcgaggaaactgcacagagcgaattgtagagagttgaagttggtgaaggttgtgaaagaaggagctttatataggaacgggaatgggagacaaacaacgggttctggattcttctacctctctctgcattatgttttctttttttgaatgaagcgcgtgacttgggaacaaacggcgtcgttttgcttttttagtttcgcggcggagtatcgcgaactttccatgaagacggttgtgggttttgcgctctagaatgttccttctctctctcccactgacgagaataacgcacaccaacaacaacggttcaatttcacacagagaaatcatacttgtttaacaagttatacaacaaatcttaaaaaaaataaaaaacggaaaaaaaaataagagaaaaagaaaaaatttgtaaatgtaataaataatacaacaaataaaataaacacaaaaataatattatatgaattattgtaagaattattatacatataatatataaattatattagaaattttggatggctaagtttggtttatccctctcaagagagactataattttttatggctgctcggatttcatatctggtattgtaacagctgatgtaaataccaatatatatatattggctaattaattaatgagtaaatatttttttagtaaaaaatacaataaaatgtagtatttgtaagttaaatattaggataaaatatccgattttattcttgaatttataaggtgttaatatttagatcctttaaaagatggaaacataaaattttgtgcgacaaatggcaccctattcacccaagtaacttgtcagtctgtcactgtcatgtgaaagagacaagcacgcttctggcgcatgctagcaccatcgctgacctgccacgaccatgaagaaccattgcttccatgggaaccaaatcactgaaacggagagctcgtgagtcccagaaccctcccatggccgccgcggatcctccgcggcgcaagcctctctcttacgccaaggcatccgtagttctctccgcttttctcgttgtctccgtcatcgctcccttggtcctttcttcgaacaagtttcgcgcgttccaacgccgtgtttcgtacgagacgatcaccgtcgtcaacgtgttccctcacgacccagaagccttcacccaggtcaaccttttttttcttcgttgtttgagttaatttacagtttaatccgtgaaagtgttgacttttgtttgtgtagctttagtacctgatcgattttgtctatgcaaattagttctttgagagatgaacttgataatttaaaccgatgagtttaattttgatacactgattgtgtgaaaattgttatactgttggtcaattagaaatcaatctatagtctagatattacttttgaagcaattgttaagaaattccatgattttattatacatgacaatctatgattggattacagtgtacactgtgtattcgaactaaattctaatgaaactgatctgcatagatgccccacttttagttacaaaagcaacacactaggatcgaattgtatatgagacctcttgaaaaaagccgtaaggatacggaaaatagtaaattgtaagattttataaaatagtaagttgtaagattttattagaaattaatgggctacttgtaagtctagtggattttcagttgaatttgacagaagttgttggcttctgcacaaaacgaagataagaaatgatataaaagcaagactaaattcagtgttggattcaagaactttcttggatgatcaagaacaagtagcacatagtcttcctggatattgtgaatattgagctttatgctaagagagagagagagagagattgtgaaattattgaagtgtgcactgctttattgatgaaatgcaagatgttgatttgggtattatttgatttgtcgcttatggagaagaaaaatggctctgtctcttgttttgatttcagggccttgtttacaatggaaatgacaccttatttgagtcaactggtctttatgggaaggtaatattactcatcttttcctccattgccttttttttctgttattttaaatgattttcattagctttgtgcattccatttttccattacacagttggagttggatgagaaattttgtgcatttttgaattgtaaatcatcagtcacctgctatcatttacctcaatttgttaaaaaaataattataaaatttacttgagggttaatcttgatgcactgctatagtttgctccattgtgacccggtaatcacgggtttccacagaagaaataaacttcttgctgccgggagaaggctttgcacatctgatcctaagagacacccatccacatccctaacagtggtctcccattatttgtaaaatgtgatgttttacattagaaaccatggctatctcttcttgcagtgagttttcattgggataagaccagtacagtatagttgtcatctaatggataagaccaaagtgttttcaactttcaagttttgtttattataaaatttgtataaatcatgatttattttaactaatattgttttaatgtgaagtattgcatttaaccttttagttatttgttgtttcagtcctctgtccgtaaagttgctcttcatactgggaaggtacatatagacctgtttcttcaactgttccaagaactgttgtagtacttagtttatttggatctctaattactctacattataaatatatatgtttttgtccatatcaatgtagcatgttcattatgtttcttatagtattggaaataattgtaaattttatatatttgttatttgtgctacatgcagcttgaggatgtgcagaagatggatagttcattatttggggaaggtttaactctcctcaataataggtgtgaggcaaattatgttgcattatattttatttttttaatttttttatgtagattactaaacataaacgatggtcctgttgccaattaattaggggatggaaaagagggggaaaatgcccacatatcttaagaattgtttccatgtgaatataatcttttgtttcctttagaaagacaggactgtctttaatattttgacattccttctaccttctaaatagcttctactgcatcaatagaaacatagaataaaaggattgtacaatttctatagaccacttcggaatttacaattttttggagccacatattaaattatgttgaaattaagggctgaaaaatacagtttcatattgcttgctactaaatgtgaaatgctgatggcattctcattagtattgggcccctgcaggagtagaagagaatgtggctgtgctgagctttcatgttgttttttgtgataataaatgaattactgaacaagtgactttctatcttttagtttctattgattttgaaagtaatcagtaatacttctaaaccaccatgtattttgagttagacatgaaacctgcaaagtgactacctcgttttctcatttctgcagtgtagcaattttttgtcatttcttttggatgttgtaggggatgtttaatttaattctatccatatataatgtattccttttggctccaatcacttgtgattgagacattattgattgagttattttcactctgacatttggtgtttggatttagtctaatacatttatccattgcactttttgtaggctgttccaagtaacttggttgcagaaagctggtttcatatacaacccgaaaaatttaagaaaggtttttgctttaccctcctatgccccaaagtgcctgttaacatagctagccagatctcaaaagcttacttttacaatttctgtagattgggacatttaatcatgatatgaaagatggttggggtctggcaactgatggaacattgttgtttggaagtgatggcagttcaacattgtatcaaattgatcctcaaacgtttaaaggtttgtctgtccaatgaagttctattcctttcctttcaccatttatgtgcaaaacctcattcctaaacctttttgtgtccagctttcaaacttgacaatacttagtgtttgctttgcattttcatggaacttaacattgccctctttcctgtagttgtatcaaaacaagttgtctactataagggtcatcaagtacacaatctcaatgaattggaatacataaatggtgaagtctgggcaaatgtttttatggtatgtctttttgtgatcaattatgattttagttcgagaaagcatcttttcttccctaaaattctaattttagccatgtatgcatgatgactatggcccaaggttctctgttaggctggattttgtttgaggttgataacttgatatttctttgtgtagactgactgcattgtaagaatctctccccatgatggcaatgttctaggatggattctcctccaaaatttaaggtctgacttttttttccatctccatatgaaaacattagtagacatcaaattgatccttgatgattttcgttcattgcatggcatcaatttgatgatgctagtaaatgaaaaaagttatcattcgaggaacacgttgattaataaaattttgaggagcaaatcaggggtttactctaataagcatcttagttcattttttgcttaaagttgcattttatctatcatgtgcaggaaagaacttatcgaagctgggaataatgtaaggagcctaaactttttgatatctagagataagatttttgtctttatatatatatatatatatatatatatatatatatatatatatatatatatatatatatatatatatatatatgttgcatttttatagcgaagctgtaatttaaaaacaggataaaaacaagctgctttaaactgtgaatcatctttaattcctgtttcgacatcaattagtcattatcagtagttgttgcacttatgtttaaatcttttatattttagaatattaatgttttgaatgggatagcatgggatggtgagcaaaagcggatatttggtaagattcaggcttctaatttattaaattattaacttgaattttgttatttaagcatattatttccattccacccgttcgtgattttcctttccccttttaggtttctattaggcatgacatctgctgataataggggtcaaaatggaagtgattttactgcaaaatccaactattagtgtgtttgcatttcagttgaaaaacgttccaaacacttttttaacccatgtatttagtgcataaattaaagggcattaaatacattataaaatataaatattttaattaattaaatagtaaataataaatatttaacttttcaaaataatatattttcatttattacttgtcctatacattttatgtataagataaaaaagttgtcaataaattgtctctatagttttttatttaggacaagagtttaaaagatcatgttataaattttcatgtacaaagatggtataaaatattcattcaaaattaataattataattttttattaattgtgttataattattaattattaatacccttacactttatcttaacattttatatctatttgtagacaaattattatttcattatacgattgtttatattttgtgtttcatgttttttataagaattttcctttaaattaaaataaataattagacatttaatatttttagttatttttaatttaattttaccatgcaatgcaaaagtgatattctagttaataggctaaatgttctgcttctttccatctaggaattccctagtgtgcatcaacaaataaagttaacgttcttgctttgtccccttttccttttacatttcaaataagtttatgcaacatatgttttgcttaatgatcaaaaaaatatgttttgctttcagtgactggaaaactgtggccagagctatatgaaatcaaggtttctcctgtaaacaaaccaattgaagaagggatcattgagaagctttgcttgcgtagccctttcaaatttacatgattgattttttctgtttctgctctaatttttgaaacccacttgggagaatgcgagctgaactgagttttgggaatagtattatgacatggtcattttgaagagatattctgttgggagaatgctgcctctttcattgtttgggcatctattatgccctacccattatagtatcattcttccgtagcaggtcaagatttttaattaaagtaagggagaggtcaataatctttcagtatgatagggttgattttgtaagtaactggaaagtgcaatggaaaaggcaatttgagatgttatgtgttgcaaaagaatggaaatacaagcaaaacaaaaagaaagtatggatggctttagtggttcaatttgaggtgtcatcacaagttaagaattggttcaccagacagagatttgtagatactatattgagtacactgtattatgtatttaagatggtggcgtagttaggaaaggatataaacattcaaagtttaatagattgattaagtgttttctagagatgttcttcacctttttcggctgtttaatgtgtattgaatataaatattttcccgcttaagattcttttcagaagacggtcatttctttttattctcatatgcttgatttattctcatagtcgtttttaataatattaacaatcaatttagcagctccaagaaaaaattatgtcaatatcttttcgtcttaatttataaaattgcctgcatacgtaatataaagatagttgtttattcttgaccatgttttaatattaatgatgatgaaagaaaaatacaagtaaaacactatttaacaaattggtttcaaagtggcccaatatgtgtaatggtgtgacaccggtggctagtatcttgaactttttaaaagatttcaattcttaattattcaaataaagtaacatttgtgggaagaaaagttgtctcttaacatatttttacttctttgaagtctcatagtttcttgttgtggaattatctttgttttcaatatgaaaaaaatgacccaacttgtctccaacacaatacaggaaagttatatctcgtgtcatagtatacatggtgtcaataggtttccacatctcagagagtgaaaaattgtattaataacattaatatccatttttaaccaaaactgaaagaaaaaacttgtggctaaccaaaaggaaaattatcatcaaataaaaataaattttcaatgtactataaaagtatttaaaatatttttttattaattatttacaatttatgattggacaaattatgattggatgatcttgtaaaatatttatagtattagtacattcaaaattaaatttttatttgatacaactaataatcaattttcaaattaatttttattttcacatgctacagttatgaagctccagattgtcattccagcagtaccttaactgagggtaatgacatttatgattttggattacttatcatggagattgtatcaggaaggattccttcatatcagagtcagccacaggtaacactaccaatgttggattcatcagttgttggttttcattcctgctttattgtctttcagataatgaatttaacatgactccaaattgcagggtcatttatatagtggactggttcaaatcaatgatttccaatggaaaaattgagaatgtggtggatccaaaattgcttgaaatgcctgcttccaaggtacttaaacgggttgctttacgatgtgtagatcctgatgtgaatcctagactcataatgggagagatgtggtttacatgcttgagactaacctacttctttttgaggtaataacaactatttctcccttcttgggtaaaatatgtttttagtcatgaaaacattaagatgatgattttttttgttttaattcgtagtttcattcttttatagtccttaacaaaattattgggactaaagcaaaatatatttagggatgaaaagcatatttattttgttttgaaataatcctactttggacctgtttttaattccctcttcctcatttactgaaggaacgtcaaattggcatggagacttatgaacacaatcactctccacaaaatcagcaaaattagttgataccaagaggaatacaagaataagcagcagcaaatgctatcagaaagtggcaaaaaaataacaaaatagttcctaaagtctattggcacaccaaattgacagaattttttagtatttgctttatccataagagtcaaatgttgttgtaataagatctgaaaaaaaattcttcctaaccacagatttaagcaaagcgactattcatcctctgatgaagacatgtgcgagtgagaaattaaattacagatatatcaaccattttttgctcctaatcatgtgtatttatactaaaccacacattaataatatatttgtaggaaaccgtaaatttaaagtacgaccagactgtactactactttttgttccttaaacataaattaaatggtggttaagtagtcatacattccatgcctattctccttaattgtatgattttggctatctttaataaaattagctggttgaaagattatcatattaaattgtaagtttttggtaaaagtaaatgttaaaaagtataaaaaaattaaaaattattgtttttaagtaacatttaaaaaacactaaaagctactaaaaaaatatttattgaaccatcaaataaatttttcaactaataaaaaaattaaaaattaattaaaatattttatccaacataaccttattaattaaagtataacaattgttcagtaaccgtgtaacagaatcatgcattgaattgacatcaacttcggagtgaccaatgcaattcaataatctacttaacaaaaatttggggtttttttggttgaattgacatcaacatcgcagtgactaatgcaactccataatcaatttaacaaaaatttggattttttggtttgagtccaaatgtatttttcacaaaaaacaatgttgatcgaaacaaataggttcaatgtgggctaatgaaaacatgctttgatacctattattgaatactaaaatcattttggtattaagaaaaacagaccatttattatatagtttcgatttgatttcatttcgtatacactcattctctcagaagaatgagacacttttaaaggaacaagtcttcagctgcacactttcaatggaaactttgtcatctggataaggacactcaattttctcttgcttcaaaggcagcaactcacaaggcttaggatagacattgcttgtaaccccctcaatgtcagtgcaattccattgcaatttcttttttccactatggatagtcacattagaaatacagattcctgtaaaaggatcattagcaattccttcaagtcttgctgaatatgtgacattctctgcaatgacatctctatagtttattccagtaatgttgggaagtgtttttggatcaaagccattgtcagggtgtgagctataagaacctgtcatccaaaacacatacttcatggtgtttaagttcattcctttgataaatatgtctctcacatatgctcctctgccaactgcagttttgattctaactgctgattgagtgttgatggctgtgaggtcttcagctctaacatcttggattccaccagacatttcactgcctaaagcaatcatagcactatctggggatacacattcaagccttctaatgattatgtgttggcttggcattccaaatttgattccatactcatcccaaccactttttattgctacacaatcatcaccggagactatgtagcaatcttcaatcctaatgttggaacaagaatctgtaaaaagggaggaaacaattagacagtggctaaattttggaccaatttagtttactatgtattattatttattaataattgaaaatttgtaataaagcttgtccgttacttctcattgaaaacacattattaagatgagaagttcaaaatatggggaaaataaacacattttttggagtttaattttgatagattgtatacagattatgtggaaatcactttagaatgacttctgaagtaatgattgtgacgatataaatccaactcaaattaatggttattataactaattcaaaaatcaattaattgtgagcagtttagagaagtggaacaataatcgttaattcaaaaatcaattgttgatattataagtaattttagattttatcacaaatctcaccattatttttcgaattgatggtttttgttgtattttaccctccaaagtgtacccctaacttttagaggtgccgaatccaaatagcatttacattattggtgtacgtattcgaactaacttttatttcttattacagacaagtgcagaatatcattcgttttctctcaaaccggtctctttcccttttttctttttatctaatgttttcctctgaaagccagtggaaataataataataataataatttacctggatctattccatcagtgtttggagagtcaactggagcaagaatggtcagcccttgaattataatgtcactgcagagataggggataatgagaataaaagaaaatactgggcattaagattaatcatcaaggcaaatgaaaattcttgtcaaaccttgtgtaaattggatggacaaaccaagatggagaattgatcaaagtgagattagatatctggatgtgatcagagaacataatctcaatcatgtaaggcctggtgagtttcaattcacccttgtggaacttgtcccaccaataacacccttgtccatcaattgtcccattgtaacctaatgaaataaaaataaaaagagacattaaaaattatttccaatgagacatgaccttaacaacctctaatagatgtttagtgatgggtctagtagttaccagtgattattacatcagtgaggttagttccaaaaatgagactactaaaccttccatcaggagcatcccttcctctgccatatgatggtagcacaggaagtgtgggccactctgattcatcctgtttatgtgggtccatggtcaaaaaacatcaacataaaataaattaaaatgaaaaactatagattatgatgtcaaatgcagctgaactaactgccaagaaatcacagttaggcaaaaaggcgaaaagaaaggctagtgacttgatgttaggtgaccaaattctaataatgtactgtaacaagaaataactcctacgtatctttgattaatatatttttacactataatagagtgcacatgtgtcatgcctaaaagatatcttattatatatttccttatacatgaatccaattttctaagattgtgtcacatctcacataaacataacataattgaccacgtgctacaacgtgaaaccatgaaagtagtctgataatctaaaaaaatgaggaggggtgagggactaaaatacctgagatccaagaatggtagcttccttttggagaaaaagtgtgaaatggctggtgagattgaaacttcctgttaaccatttccctggtggcacaacaaggagagctccaccatcagatgcataatggctgagattgctaattgcatattgaaaggcctttgtgttagatgtttttccatcaccaacaccaccaaaatcagtcaaaactgcactgtgttttctgcagctgatagcagggtactcaaaacagtccaatccattggccactctgcattcaacaaccctcactccttgtaatcccaataacaaaactgtgtagataacccccacaacctgtagaagaaatcatagtttatatcgaacaccaaaacacaacaaaggacaagtttccctgtcctaaaactcaaattattgcatttttgtaggtttccaatactgcaactgcagctgcatcgatcacattaccaacattttatgcgatttactagagaacgttaaccgctagctattttaaaaccttggtaggtaatcaatttatacaaatgaataaagcaaaagaggggtctatgaacaagcacaaaaaccaaaatgataaaaacattgaaacatactaagaaaaatagaacagaacattgtttgcatgtttaaaaagctcaatgaacacacacaaagaaaagaaaaaatacattacacaggagttactgagttttggacacggcttcatagtttaagtgtgactgtgaggtttgtttctgtcacagaagacaaaggagtcatatatttaaagagaattattactaatgcatagtatatggtagactaaagagtttgtaggagattatatataatctagggagagattatcggagaatttcacgatcgtgatgattttcaatgctatattatggaatattaagtatgcagttacgtgttaggaaaccacagtatggtacatgggatggcagtaacaggaaaaaatgttacgtgcatgagaatgtgccatgacgtcttgccatttttaaaaagattttttttcctttcttggactatttgaacagtttttcgtgaaacaattaataataatagtaatagaaattttgcttgattgttaacactttttttcaagaaggcgtacgttatctactattagtgttaagagtactgcacgactctaataagaacataactcatatcatgacatagcataattataatttgtaagttagtatattattcagaaaggttaatttttgggtagcgttactcaacgtactcttaattgtgtctataacagaataagagtcatgaaaggaattatacaaaagaacttatgcgttgattaatgaacattaatacgctaagggagagtcttgttattcctaataatcttatccagttcaattagaaaatgtttgcgatttataaaaaaaaattattgagacttacaccaaatctcagttactcaatttatgagatgagagttctgcaatgcttccaataagttgggggattttgacagtgttagtttattaactaatcaaattatatgtaattttttttatattttaattattttttattttttcaaattaatccttgattattactttttaaaattataactttataaatttaaaaatatgattaaagataactttagaagtctgaaccttaaaaaaatttagttattttcagcactttttacaaaaaaaaacttttggggtttagggtttaaatatttcttatgatcgctttttaagcatagatctattataaaaagcgttcaaattaattaaaaagattttaagattcagacttctaaagttatctttaatcatattttctaatttaaaaaagttacaatttaaaaaaataataatcaaggactaattttaaaaaaaaattaataaaaatatgacatgtaatttgattggttaaaaacgtaaaagtatcacaacccttaaaattattggaggaactctcttaatgagatatagcaaaatcttatcacatgatataccaagtatcaattaacattttagaaaaaaaaaattaactgaatcaatcctttagatttttttagttgatcaactgttgagatttggtgtaagtatggtatatatatatatatatgagaaaaaatcaaattatattattgacaattattatttcatttatataacttaatataagatatgattttttattgatctaactgttgaattacatctacgtgttattaatattgtttgtgtcaaattttggtaaaattaaagaacaataaaaaagtaatcaaataatttatatttaaaaatgtttctattgcatcgattttaatttatatgaataagataataaatgattttgaattaacatgaaacttttcatatgtgaaaggaacttttgatccaacgatgaattttaaaaaaatattatacggttaaaagttatagaataatgtatatatcgatatagtttaatttattatatatatatatatatatatatatatatatatatatatatatatatatgattagaaagaaagaaaaatgtgtgttagctataatatttgggtattttgtttttagtgtgatagccatctgtgtttgttgttgatttttttttcttataggttcatgctagagaacatggtattgaagattagcatagctcaaagtagtttagtgagctttagttttttatttatttttatcaatatgttagtttgttagaatgttattttttattaatagaagaaattaaaatattttttttcctcttctgttcttctttaattatctaatccaagtgaactttagtaatagtcaaattggtgtctatgagccaatcaagcctatttaacaagtgttttgtccgttaaatattctcccttttctttcaggaattagtgcaaatggtgtcttaggtaaattcgcaagaaggtttagaaattgttatactaggccaaagaattaagggtccactaacctttatgttttataataccactcctagctaggtcaacaaatacatttctcgtagcaaaagaaaaaggatgttatcttattaaaattgtgtcacttaaaagaaacaaacaaatatcagtgtttaggtttggatcattatgatattagtctttatgtttggattatcatgatgatattagtgttttgttaatgattaatttttactaaaaatttcgattgatcacttttaataaaatcttctttttaattatatttttttcatccacaaaatttaaacttaatttcacttgaattaatgatatgtattccctctagactcatgtccaaacaaaaataactaatttcacactaattaagaaaattaattgacatcatttaattgtcccatgaagtaaaaaaaaaaaaaacttatttctaaaatatttttcattgaaacttattatcatgaataaaaaagagtcaatcaaataaaattaaaattaaataaaaaatattttaaaaataataacactaaataagataaaaattaattaaatttaattatatttaagtcgaagatataaaattattttttttacttatgtatgtaatattttttacttcttgtatgagtccaaaagcaaatatattagtaggtcaatattcatttaaaaaagtgaaggtgtatatgtcaattaatgagacatcacaaaaagcgaatgttaattccttttttaaacaaaaaaaaaaagattgttttcccttttaacttgtcgcatttataaaaatatataaagtagtttacctagacaatatagtttttatcccagataaccaaggcatctgagaatacttgcttagacacactctgccaatccttgagattgtgtgccaactttgagtctactaaacctcaaatctgattatgtttacgatttatgcattaaaaaaaatctgataatgttatccacagtgagattgtgtgccatctttgagtctagtaaacctcaccctaccctttcaggtatctttaactaatggtgccaaaccccatttgagtggcatacaaagctcaatgccccacataagggaaccaaccaacttattactaaatggaatgtagctgacaacccccatcccactaggggctgggaggaaacaaaattgttcatttcctctatctctctctcccaagccaaaatcaaaattttaggcatcaataatttgttacaccacccccttctattttttacttttgtttcataacacaactaagaaattataaaaaaattatgtgtgtacatttaaaagtcctaagtaagcgtatttttgcacatttttacaaaatattgttcttttttactttcttaaccgtcatctaactatcatttgtcttatttcatatccatattttatatgatatatcgctgtaaataattattatatatgcaagcaaaatttttggatcattttatttcatatttctgatttacactgataattcttcgaaacattcttgatttgtattagttgttctcattagctattttgtatgatcttgctctcctacttatctctttctccagctcttctagccctcccacctcttcaatttcctgcaagccatatatttaattatttatagtgacaaacaaaaaattatgtataaaagcttgagccaatcaactaaatattaataagtatccaagaagaagaaaaacaatacctaaaaaaatattcaattaaataataacaagatacagaaacgaaaatgcaactgaccttgggtcccaaaaacagcccatatggcactccattgaatttttccgaatggtgaagctgacataaagacaacaccagtatcacgggtatcagaacaatgaaaataaattaaaataaaatgaacagaaataaatttccctttttttggcttcttctagaaaatgaaaatgaataataatgtaatgagtattgctgattagtgtcacgttaaacatacattagaaagtgagaacattttccaataaaaaaatttaattttgttgcataatgttatcctaaattcccaatgatgataataatgaaaattacttggtgagcagaggccacccttctgagatagggcacgtttgcaatggggcccaccgggaatctcttatgaaccaatccatcgtgtacaaacatgtaggccatcccaaagaccgtaattccaagaccctgttcatagttgaaggtatctatctatcttagtaaaagtgttcaatcaagatcaatgtcattaaagtctaagtaataattattatttttattggtatttggtaaccctctaccgtgagagttgccaatgaaactggtaattaagaatctcaccccaatcaaactcttaattaagagagagagagatagaataacaaaaagattaattgtaattaggatttttgagaatacacgcaccgcaccaaagcaaaggccagggaccagtcccttgttaaagaaaccataggaaaggagagcgatggcagggacagcgttgattattgcaaatacatcgttaagctcgaagggtccttctcttggtcgatggtgggactgcaattgaagttaaaaatttgttagtttgtggtgttgcaaggatccaatagtttctggtgattggttgctgagacatcacaaggattaaccaaaaccaaacagttttttctagtgggtcttggactctgacactgtggctttagacaattaaaataaatgtgttttagattgttcgttttccattaaaattgatcttagtctttataccttaaaaaagatggcctatgaaagtctcctattgttttaaataaaaaaaaaactaggcatactacaattattagttttaaaatatactacagactaagaaaattttccaccaaaaattggggaccataacacattttaacaagagaaaaaaaaaacaatctaaaacaaaattgacataaacagcggttaagagacaggattcagaggaaagatgaaccaactgaaagcatacctcatgcatgtgccacagcgaagcatgccagagagccctatgagcccatctagcccaaaattccatacccacctgaaaatcagacatacccagttgaatacttgaatctaacactcaaaattcacaaacaactcacccaattctgaactcaaaaaccattcaaaacccaattggaatcataattagtttaaaggataactcacagcagctcccactgatagagcaaatgtgccaaacatttcagaccaaggcacttctccaccctacaccaaccaaacccaatttcattataaaattatcttcatatgcaaatcatcatcaatcaatcatgcatgacaccaatgtcaggacataaaaaataaggttttaaaaaacgatccgcaaaataaaagtcaagtctttgtggtgtctgtcattccaattgtggccgcatcaccagcgtttgtttataattttctatgatatccaagatcacaactgtggtcgtatcagcagcatttgtttataaccgcgacaaaaccacgaccagagccgtttttttaaaaaacttgcataaaaataagaagaaaaaagaaagaatcaattttaaggcaccacctacctccatttgccacgagaatctgcaataaacagcgaacactgccatggatgtgatgccgaagctagacatgacagcagcaacaaggtaagtgaacctctcagactcttttctggccaatttctcagccaactttggtgacagaacttgttgagcgggaggaggaggaggaggaggaggttgttcttgtggctcaatttccatgtgggtgccttgttttgggtcctgcatgaggacacaaacggtgaaagttgaaactttttgggttcttggtgatgctgtgtggtggaaaattctcatgggggagaaagggagtgttgttgggattgatttggggaggttcaggtgaggttggtggaaacggaggagggacttcatggttatggcggcggagagtcctaccgccatggtagaactagaaagtgttgaaacttgagaacaatgtgagattgtgatgtgtagtgtttgtgtgtcttagagagagagagagagagagatgagagagagagagagagagagagatgtttgtgtgaagaggaaaggtttgaagtgtggaggtttaaaaagggagatgaacagagaccacaacttttttgttatgtgtggaatttgtttcttcggtggtttttttatgtggggccactgtgaacacaaaatgaaaaacctcgtggaacattaccacactataggagtcattttcagctataacagagaaatgaaaaatgcaaaaataatcactttaacacttattaaaaaatatagttgaaattattaaattttattaattttaaataaaataaagttatttttaaaatggtttttatttaaatttaatatcataaataaaatagagttattaaaaataaataaatgatattttataacaatatcattaaataataataataaaattagttaaattttctataaattttaatggcataaggtgtgttaagtgaagagtctaagacttctcttttaaaaattacacacatattaatatggtttgatattctttcatttctgtgaaaaaattgtttttttttctacaagagaatttatgtgtttactttttcaaaattttacaaatctaaatatggctcaatattcttccatttatgttaaaagtaagaaatgatatactatattagagagtatagttgtttaagttataaaaaatgaaaacaaataatatacattggtgtgactaatttaaaatatgtaaaatgtatggttaattttgcttcgatttttctaagtaccattgtatatttaacaaattctaccaatgtaacgctcacaaatgatgttgggattgatgatgagggataaacaccccaccagttcacccaaactacactaccatatcaccaagtcaaagtgttcatttgatatatgaaggaaaattgtacaatatataatttattttattaataatatataaatatcaatatatatatatatatatatattaaaaaatatttaataatatttttttcactataacattgatgtaaaatatttataatttttattggtaattaatctttattaaaaaaatctgactaactattattagtaaaatattctcccttaatcattttttatttacaatactcaaacttaattcacattaatcatctatttgtaggtcatacattaatgagtcacattaaaatattctgtcgacttattttgttcatttaatttaagaagaatgttattaatatatatatatatatatatatatatatatataattgataaaaaaaattatacaaattttactaaataaaacgagtgtgaatttttatttactaaatttgatatttatatagagatgatatttcatttaatatattaataaatttcagttaacgataatatattaaaatgatccgtgtgccatctttatcagtggatgtagtcaaatttgtaatgtaatcatatttgtaagttgactattttataacttcatgactcgctttcgtaagccaaataaattaaattaatcaacgagagtatagcaatccaagaaacgaggtgaggaaaatgagtactttcaacgccaccatgcatgttgcatttttagagagtttcatctttagacgttgctattatgcagaaattgaatctgcatgaaagccttcttcacaaaataacctgtaaatctaaaaaatttggatggacggggcaacatcgtgatataatatcgttagtatatgtaatgtattggataaatgtttattttattcgattaaacttaaagaattctcttctgtaacataatggcccttgtacagtagttcatttaaaaaactgacatttctagcagcattattggttcaagtgaatttaactaatatctcataaatgaaactcatattagaatcttgtaaataataaaataaaatccataaaataaaaagaaaaattccacttaagatgtttaattaagttttctaataaaattaattattaacaaagtcaatacatactttaaatcaatgataccataaaagaaagagagaaaaaaaaactataacatctccccccatatatttttcacattttgttggctgaattaaaaatagactttaatttatacattatccttgttaactaatagcatacatgtttggaatgactaagaggtgaaccaaaattaattgtgaaatcaagatgaatataaaacaaggtatagttactttaaaaaaatcatgataacactgtaattttgaaatagtttccataaatttaaaggatatacatccaaaatacaaacatgctatataagtcaagtaaatattcatcgaacctagcttccactagctaggaatgcagtcccaattcaagaggtgcagaagtcagaacagtgaaggccacacaactttaccaccccatgcagatctaaaagggtatagaagatccaaaggaaaacaacaggtatctggctggcttttgggtaccattttttttttgtcttttgtttcaagaaagagtgaagaattaaaggattgaaagctgagatgtggctgcatttcgtaacatgctcgtgcgaaggatggaaaatcaagtggttcataactaaaattccgccaaagtatacgaatatgacgttgaataccaaattgtcgaccattcaattcattaactgcatatcaaccctaccgcatacactttttaacatcatactgtaaagtttggtcacgtagtgatataagggtctaattaatacgttcttgtcacataacttaattgaaaaattgtttcaaaatgcgtgtgtcaagtgagaaattttaatcatatctgtttgtgtgtctgcgtttttcattcaaagttgtaaggagtgagaaaaaaactattctttaatttgtctagtaattaggaattgggtaacatatattttgagttctctagaactttttctaatagctaaaattacactgcactcttttttctttagtttttttttttttttgttacattgcactcttttttctttacttttttattgcctaggaacgttactttagaaggcaactgttgccttggaagcaataattttggctaggttgcactgggggttacttcagaagcaacgtgcttcttcctccaaaattgcttttttgggtgccgatgcgggtgctcttacatcatcgatcactttcatctcattttaaggtaaaaatattacaggtggagcccacatataatcaaaaactttcatctcatttcattgcaacttttatctcatttgattgcattttcactttcaccccttaaatttcatatgttccaaacacacccttagtcgttttttaaaaaaattgttcattttttatccttttaattttttaaaatgcataatgtttagtccttatatattatctaaaaaaaattccattcctctataaaaggtcatcttaattcttaagaccaatgacgtttggtatggaaaagaaattcatgtttgagaatcataaatattaagaatcatgtttcctgataatgaaaaaaagttgtttagttctctattgaaaatttttagatgacttttttagaaagaaaaaaaagagttatgttatatttttacccataattttaactatttatcacatattaaataatttaagaaaagtaacataacgtttttataaaacaaaatttaaacttattaggaaagtagaattctcatctcccaccaccagaatattattttgtaagaatgtgagttaaaaacgattccaaaaatcataatttcttaaaaatatattatttaaaaatagtactaaacctggaaaactaaattttccaaattagaattgctagaaaaatgaaaatttctccggtatcaaatattccttaagttgatcaaacttcgtataggttaacatataattcttactaccctgcaattatttcatggctttctcaagaccaaaaattaagttacttcctaacgcatcaaattattgataacatgggcttttgggacatcatacctttcaattaccttctttttttaaatcaatttgaggacattgagatttaaagagttttccacctttataagcaggcatgacatagagaatgagaatgtgtattaaattatttgagaaccttttcaatatatttctttatgagtctaagaatgtcgcatgacctataataaacctagatgtctaagaaaacttgaaatatcactaatgtccttcaaaattaaagtgactattcaacatatatatgtttagtctccatcaaaagttcaaaccttaaaaagaatttaaaccttaataaaaatctaattgagttgattaagcatgatgatatgagtattatcaatctcttaatatttgtcttctgttcctatagataaaaagaagaaaaaaagtaaatacaacaaggcattccaacaaatcaaggaatgtccatacaaagtttcaaactcaaaatccaaagtatattattaaaaatacaattcattttcggattaattgtcataaaacatttcataatgtgtatgatatttttctcatctacagaaattgaatacaaatataaaaaaaattataataatttatacacactgttcaaccaaattagatccgctcaatactacgttttatggacaaaataggtatgtcagttgtttatggacagaaatctcatactttcgaaaagccattttataacctataatgaaaaccgccccaaaagaatttttcaatccaagaaaatgttttgctctgattttctagagttagaggtacatcatatgtaaaagagagagtcctcgatcaattttgaatttcatggacgaaataaagaaaaattgaactcacataaattgtaagtagtatgtccaaaaataagttttagatctaaccatttgactttcacaaaccactaaaaaataattactatctaaatttttaataaatcattggcaaaaacaaaatagggcgaaaatcaggttcaaaattatgatataatgtttcatttcgttttacaacctagttcactcctgtatattagagttttggactatgaataataatatccctaaattcatagtttacacagataaatagttttctagatttttttaaaaagtgaaacatatttgaattcaattattttgtgaatgttacctaaacaatatagtaataataataaatttgcataattgacactcttcattgggtgtccttatttaatagtagttgtgatggacatgaacatgattcaacgcggtttggattccactattagataataacgatgtcgtaggcatccacgatgcctacctcaatagttcccaacaacatcccctacttcactttttccatgtccttctttgtccctcacacaaaataggtgataggtccaacacttggggaaccctacaagctgacacgtgtgccacattcgtacgtgtgcatgtgacacttggcctttgaccctacgccattagctagtgctactagtgtctcccacctttttcgtatttttaatcttttttaatatacggggaagcactgagtaattaggtcacactttcactcaaacgattctagccatgtgtcacactcccccgtttaacctgcaagaaattagaaaaaatgggtcctccagtttacactttaaaacgtcataatcgctataaaggttttgcacccactaatcttttagcatcattgctaactaaggtgtaccaattaaattggtaacttgatttatccggaatcaaacttaggtatctgaaattaatctaattttgggttttaaactccttctttttaggaatcaaggtatctctgattattttaaaaaaaaagtaatttaagtgtatattcatttgataatatttcagcacactaatcattttgtttttcttttactttccgtaaagttaagctgggctcgaaagtcaacacccaaaactaatggattagcccgtttcatactatcaatttggaaactttattggtttggactgaattaatgaactccgaaaagacgaactgagtaattaaataaaattttgatgtagctttttaatttagttttagtgatgctctatgatagaaattgaagttgtattttaataatttgtataataaaagttaatattaagcattagtataagttaccgaaattttgatcgataaataacataaatgatactataaaagctctctaatctttttttcaagagaaaagctctcttaacgtatcccagatataattgggttaaattgaaacaaattaattgaaatcgatatgcataaatttgtgtgttccattcctttagttgataacttgataaccgacctattaaatttgaacccttttataaaaatttgccaaattataatacgtgataaatataacaagcttgaaatcacccttgtattgaaatgtgttttataatttttcaaaactaaacaaatctagtaattgaggagggggtgcatctcatacaccttgaaggctagaatcaaaacaaaatattgtaagcctgtcaaactcaatcacaagcaagcaaagtcattccaagtttcctaggggctagggcgttagagtagagtgacactaatttttatttttgtttttggtccctttcacacaaattaagaagaaaaaagtttgacaaacacccgaatgttatctaataggtagagagagaaaaatataaatataatagagtttataacataataaaaaaaagaaataaaaaggaagagatattaataaaatgtttaaaataaaaaataatttatgtatgattattcaatcaagaaacgtgcaagctatatatagcgttactcatttggtttctccagttgctttttctgttccaataaagaaaagcaacattagtggaacatatacgctttaccattctcaatggtctattgttacaaatggatcgagaaagttaaagaaaaattgttacaaatggaatgacaaagaaagaaaaagacaattgtttcaaatggattgagattacaatttttcctaaaattgtttggcggtgttccccttgtaattcacacctgtcaaattttgagaaacacatgggaagtggccactccattgcttacataatatcttaaattatgtcattatatatttatttttaattctttaattcctattcttataatatttatttgacaaattttgactcgcacgcaaaatagaaggttcatcagaagttctactgcaccgactttgatgaagtgcaatgaaccaaaactaattatacgattatatttgtaaagactataatgctgaagtcaaaacacatttggattggacaattttatatatggtaagaaaaggataccggaaaacaaaaaattgatatttatatgtgagaattatttattatgtgtgaggtcactactacttacacattaattagggatattgatcatgattaattaacacgtaaaccatcatatttaagagtgattgacttctctttagttattaggattaatggatttaatttatgggttgtctcatcaaaataacactgtataataattatgttaatatttaatgatgacattcaatgttaaaaatcatgaaaattgtatgattttaaaggaataatacatggacactatggaaaaagacagtagaaaagtcaaatccaaaagtaatgggataagtcaaatccaaagtagaaaagtcaaatccaaaagtaatgggataagtcaaatccaagagtaatgggatgatatgatgatttgtgataaaagtcttttttgagttagggaaaactccaaaagaaataagaagagaaggggaaattggaagttaaaactcaataaaatttttgatcccatcaattcaaatgacagaatccaaaacagcaccacaaaaagctagagtgtgagtctccatattaaggaatatcttttgctgaacagaacctcaatggtctttaaagtgggtaggataatcctgtgagatttcttgtagtattgttggagatcccacaagatgtcagtagataacatgtataccatagatgttcttgtattagggtgttcatattcaaccccttctagatactctaacggtgccgagagtgataccatcttcaaagaatcttgtaacccaccaatagatataactaaacctgatagcacatcgatctctactataacaaccaaatataagtaactgtataaagcgtgggtatgaataggaaggagtacataataaatactttttaattttagttggttaacaagatttttttaaaaaaatcaatttaatttgtcattataatacacatttcaatgattactatgaatttaagcaccacatgataacacatgttatggaatttgtaattatgacacacatttgaatgtaactaattttaaaaaggtaaatgttaattgatgcttttagatattgattaaaaaactaaaagaaaaattattgaaacatataaaattataattttcataatttttttacattctcatatgttttatattataaatttttccttttaatttcttattcaatgctctaaaaatactcgttaacaagattcttttaaaaatttgtaattatgacacatattgtaatgtaattaattctaaaattttgattattataaaagaatgaaattatgacatacattccaataatatttttctatttacacgtttaattaccttgtttagaaaactttgcatgcaaattctaaaagaattcttattgattacaacttctgcgttaattaatgtacattaaaaaaaggttttgcacataaagattaacttagcgccaaactcttgatcgaaatgaaaattacaattgaaattaaaaaaacaatttaatattgttaaaattttaatcacatcaataaataaattaccttatttaacacctaaatatgtacacaggcccgcgtgtaatatttcaatcttcatcattttttcttgatccattattgagaaattttcattacctcaaataaaatatttgatccacgtaaacatgattgaccgtaaatatttacccatgttaattattatattaaatcaattaataattttttatatattcaagattttatattataatattaaaaatataaaaaaatgtttagtttcaatttattttaatgattttttataattaatgcatttatataaacatcatggaaatacattgaaatataaatatttgaatgtggaatttacttttactaataattcattttaaaatggaaataatcataatgatattaaatatgaaataaatcaatcaaatatggaatgcttatttgtttatggaaataataaaaatagcatttaaaatcctactccattttatattgaaagttattttcatattaaatattttatttattgtcattctatttatttaataattacacatgttgccaaattgaaaataatttaatagcatttttatgataacttttctaaaaaatattagtttaaaatagaccttttattttgacctaaatatgaaatttccctttaaattattttcagattaaattgttcatttattacacatagtatgaaacgaaatttaactttttaatataaaattttatacatatgcaatattaaatcaaaatttaattcttttattttattttcaacatattttattttaaatataattatttggatcttcaactaactatatatattacaaaatagtaattaataacttaaaaattattatactttatgatacattaatgatatctacaacaaaaaaaattattattttgagtataattccttattcaaaaattttaaattcttatatgttaaaaattttaaatattagacttatctttgctttatgatttataactgaaacactagcaaataagcccgcccatatatcttttttttgtcatccttatcatttatatgacagtataataaaatgtgaattcaacatttctttcttcaaagctcctgcatgtattatttcttcagtagaatctttatttaaaactttttatggggatgggagggactgaggaggaaagtaaattgggtgaagtggaaaaaagtgtgtaggagaaaagaagagggtggtttaggtattatagacttgagagcctttaatctagctcttttgggcaagtggaggtgaggaatgttggtggagaaagaaagtttatggtgtaaggttttggtggggttgtaatgtgtttaaaggggtgagttgtgtgattctagtagggggatcttgctggtggaagcaaatatggggggtggatgatgatgaaaagggttgtgtgagtgattgatttaacaattcagtatataaaaaggtaggggatgggcgaaaatttgcattttggatggataagtagatgaagggtgatagcttaaaggatacttttaggaggttggaggtggtgtttagagaagaatggtggttatatggttacatatgcatgtcaactgtcaagtatgttgacatctaactccctaaaagtctcacgtgcaaaaccaatccaaatttattaagaggttgattaattatgtgaaagagaaaaaaataaaaaagaattagagaaaaaatattttaatgaaaataaagaaaaaaaaatgtgagactcatactattttttaaaaaatttctttttgaataatattttttctcttcaaccaaatgactctaatgaaaataaaatggagatgaaagttgaaaaatataacaaaactcctacttattaaatgtcaatcattgtcttttccttcttcccattcaaatagattttgtctttgcattctgcatttttattaaactgtactgtttggtgtacgtgtttccttttttagttgcttgacagtgccatagttccaacttcaattgttctcataccagccttgatatccctctcaaaaagtggtaccaaaacaatctcaatagtcaattggaggagggacatacttatcaaatttgtaaaattatttctgaatttagtcatgaatgaaaattgatttcattaaaaaaaaaatttaaaagtgagatatttttaccttaaaagcaaatttgatttaaaatttataatatttttttaatccagaatcagaaattaagtattttccaatccatccaatcaaaaactaatatcactgatacataattgtcactgactctcgagaaaattttagaaaattaaacacaatctacaacaacataaatcgtttcccaacatatttatacatcaagaccttacatcattactcatatcctttgggttgtaaaatttagtgtatattgcaatctagaataataaatattttgatcacttttagttaaatcagggttttgcgacaaaattaatcttacctgacaatgaccatacatttgtatcttcaaaaaataacgtttgataaaaggcaaaatcagttctaatacttctcttaagtgaaagtgaaaccaaacacactaaaatttggaaataactcaacagttgcaaaactagcttccaattcaactgcattgatcccaacaatcaggttttaggttggattaagtcaagtttgagaaacaaataaatctgttacggattaggccattgggcagccccaactctccaagttacaggtccagcatgcttcaaatcgacctgccaatcacaccatctcacaaggaaccttgggaagtaatcaaagtcagcaaaaactagctaaaatctaattgcgtttatgaaagcttaccgtcaatttatggtgtagctttactcgaagcagtaaatttcataagatctacaaaggtccaaccttttactttttactataaaatcaaggcagggtgaaaaactatgcaatcactaaatgctgtatttgcaacaaaaatgaacctagatggctgcaattcactttgactggtgtcaaccaaacgatacagagtacagacattaatctaatctcaaaaaattactagcaatgatgaatggaaatagcaaaagaaacttaaaaatcatactgtacacagtttcctcctcctccgtctagaataagcacttgcaactgaaatacttccacaacccaagacactattgcaagtttatcctatatttataattaaaacaaaaatatagatgtagttctctaaaggcttttagagttattttccaattagaattagagttttatctcggcaatcatcctaataaaagtttatattaaacatcaacataactcactgaggtaaaactctaattttaattaagaacaacaacaaaagaacctaagaaattgtatctaaattttgttaccgttaacaattccaaaaaaagataatcattcggtgaaacaaatacaagggcatgccatgaaatatctaaatggaagaacaatgagaataggagttttgatatggtaatcaccttaataaaattatgcattaaaggtcaacatagggtacaaaaataaggcttaaattctgattacaaaacataaccaatacaacctaagttttgttgcagttaacccaacccaaaaagatcattcggtgaacagccacagtaacaacaaccaaaacaaacatcaagaacacagtatatcctctataaacaaattaacaaagttgattttcattcgcatattactatagtataacttcaacttagcaaaaaaactgttcattgcagcagattttatcctgccaattataatggagacaaaacttaagttctgtccttcagatgtttttggcgttatttttcaatcagaaatcaatttttgtctcaataatcatcccaataaaggatgacactgaagattaacaaagattagcaaggtgaaacttcaattctaataagagaatagaactgaaaacactcaagaaacagcatataaattttgttcccagaacccaacccaaaacagaaggatcatcatcatcatcatcgagtgtacaaatgcaagaacaacaaccaaagggaacacatgaagcacacaacatatcctctattataaataacttaacaaagttcattttcattcatcgactatcatatcataacttcactcatcaacaaagcaaaagaatcgttgattccagcagagctccaacatcccaacacctccaaaaaccacagcaggctctacaaactagtcagaactctctcaattctcataaaaccatcaacagcattaaaaaaaatactcaaacaccgtccattataggcactaacaaaacaaatatactcactagtcactactcaaccaatcaattaaacaaaaacaaacaaccgtaactaattaagtgcgtgtttggttctacggtggagaattgattttgagtctaaaattaattttggataaattttcacatgtttgatttcacattagaggataattctgaattgattctgggttgtaacaaatttgattgagtaaggagcttttgcgtcaagatccaaaattttatacaaagtttttccactaacttaattttataataaaaaccattcaaacataaatcaaatcaattcaattcaaaatcaattttgtcaacactcatccaaacatgctctaacccaaccaactaactatacacaccattacgcataaccttgtttaaatcctacccaccaaaaaaggagaaaaacccacgtttgggttgttcttccaccaccacggcctgcatgctatcttgctccacgagcctccacgcggcttgttcgaacgccaatccggccaaagtgggaggcttgttgagcacaagagggaaacctctattggtgcttctaataacctcactatcctcaggaataaccccgagcaaaggcaaccctaacatctcttgcacgtccaacaccgacatcatgtcctcccctttgatcatgtcggtccgaacccggttgacgatcatcttgatgtcccgaattccgtcgcattcgaggaggccggtgacgcggtcggcgtcgcggaggctggtgatgtcgggggtagtgatgaggacggcctcgttggcgggcgtgatggcggtgatgaagccggcgtcaatgccggcggggcagtcgatgaggatgaagtcggggcagccctgtgaacgtgctttcagcgcgtccacgagccaggtgagggccttgccgccgaatccgagggggagtttggatcggggtttggagatgcagaggagttcgaagttggaccagcgcttgtcgcggacgagggcttggtcgaggcggcattcgccattcaggacctcgatcacggtgtagttgacgcggttctcgaggccgaggaggaggtcgaggttgcggaggccgacgtcggcgtcgatggcgaccacggagaagccgagacgggcgagggagaggccgatgttggcggtggtggtggtcttgcccacgccacccttgccggaggtgatgacggcgacgcggggggtggagccggagagctcgggcttgcgattccactggaggagggcggagggaggtttgggttttttgggggttagggttttggaggggaagaggggagaatgggggcggaggaggaatgcggagttgggggcggtggtggcgccgggaagaaggtggagagaggacattgggaagggaagagagggagagggagaagaagaagatgaatgatgatgaagaagaagcacagtggagatgagtgagtgaacactgaaagtgagaaatgaaagggaagaaggttgattctttccgcttgagggtagctttttcttttttttctttcaagtttataaacatttttaataatgtaggaagtaccttaaaagagctacaaagtttaatatatcaacgattcccaaaataatcccttaaaaaacaaaacaattcccaaattatttaggaatttctttacccaaaataactatttaagaatttgacttaaatttatttttgttttttatagttgaatgattgtgtaattttggttctttattagttttatattctattacatatctttaatagattttaagaatcaatgtacttacctaatgttaaaagaatatttttttctcttaattatctgatttattaaagaaagtggactctaattaatttgaaatttaattaaaaaataagtaatatttaactaagaattatttccgtaaatattatttgaataattcaactttaactttatctctttgtccctccttgtatgttgtagtgttcttgttcatactttatatacttactaaggatataaattttaatttttcgtgaaacttacttcaaaagcaaccattcttccttttatgtactttactgcaaatattcttacatttagatacattattcaatttttcttatgtttcacaaattgatataaatctatctagaaagatcatgcatcggggacttgagaagagcttgcattggatgggaagctctatgactacaacaaggagcaagtgtttaaaaaaaaacaaaaattgaacacaaattatcatttaggagtagttcatgtttatcaatattaaaggtataccaaaagaggtcaatatgagccaaattaaagaggatatagctaaaaattagcactcaacccaattttttaggtgttcaacattaagactacaaaaagcatcatgtttaagaatttatggtcaatccagaatgagcgacgctcaacacaactcttgcgcttaactcaagatttctcactcttagtttcaatgtccccaacaataaagttgaatttacacatttgaagtaggatttcatgtttggaatatattaaagttaatgatgggccaaatttgtgttttagtgaggctcgaacactcataaacatgtttaagacatttaattagagtcaagactataaataacatggtttttggtgtaacgcccttgagtattgacatctcgcactctataacacttcatatgatgatacttcactcaacttccttgttggtcagaaccctccgtaggaaatctttctaagacctcaacaatttgctcaagctacttctaggaccaatggttgtccctacaaatcaacatgggacttttcagtatgttttgtcctcactcacacacttcttgggaaactttccaaaagattactcatttcataattgctccaagttaaacacgtttaacttggagttcttaagtaatgagctaccgaaatagatgcatcttattagtataggtagtacaaattaattcctttgagtcatcatcaattgtatagtctcatacctacacaacctctggaaccatctcattctgatgtgatttacacggggtgttacaagcccaccatttgccacccgatttttcctcgaaccacaacatattaggagaaagatttgttctgatactatttgtaatgcccctgagtattgacatctcaattactcacactctatgatgtttcatacaatgacatttcactcaacatccttgttggtcagaattctttataagtagtctttttctagacctccacaattttcgcagactgcttccagaatcaatggatgtccctacaaacaatataagacttttcaatgtgttttgtttttacttacacacttcctaggaagcttcccaaaatgtcagtcatcttataattgctccaagctaagaacgtttaactatgaaattcttaaatgatgaattatcgaaaagtagatatctcttgctggtataggtagtacaaaaattaattcttttaatgcatcctcaattatacagtctcatatctacatagcatatggattcctcacatttcggtgtaattcacatggggtattacactccctcttcctaaggaacttataaatcattgtgaattgtaggccttgcttatgttaagagtataatatttcttttatttagtgtttcacttagggcccatgaaatctttggaccaaccttacattcaactctttcactttttttttgcttgccttagtgctcatgttcagtccttacacacccacccactatactattttcatgaaacatatttcaagaataatcattcttccttttatgtattttgttgtagatattcttactttttagacacattcttccttttatgtttcacaaattgataaataccaatctaaagagaccatggattggggaattaaggagagcttgcatggatgggaaggctctatgactagagcataaagcaagcatcaaagaagaattgaacaaaaaggataatataggggttattcatgtttaccaaggttgaaggaaaaacaaaacaggccacaatttgagccaaattgaagttaagacaaccagaagttggcccttagtgtagtcttttgggaactcaatgttttcactacaatgaacatcaatttttgtttgagaattcacgctcaatgcatgatttgggctcttacactcaactaatgatgtctcgtgctataaagacaaatatcacaaaaaggatggttgaattgtgattttataaattttttaaagtcttttcgcaatcaaacaaagtttttatttgaaataaaagctttgtaaatagataatagattttcaaaaacatggtcaaacaatgaaaaacaattttgccaagcaaaagatattttcaaatgtctaaaagaaaattcaaaccctaggtcagttaaagcaaaaagaaaacaaataaagatcagacatagggagttatgctggtttatctctaccactgagtcagcatccagttcttgacaaatgatcaagtttcactaacttcacaagttacaagtattatgtcataactacttttagctatacaaaacaagctttaccccaaacttgatcaacaccaaatattctttgtttgtaccaaaccattgttggctctaaacaaatcagaggagatttattagttgttgcacaatgtctaaatcaatgatagtcttaaagacggatttacaatcagtacttagtattttctctcaatatgttcaaagtgttttgagagttttttttctaactttgcaagaatacacaaaaatgttttttttacaaaaagaataatgaatgttttcatgcaaaagtttttgttcatattttcaaaggtcttggtatatataggcttcattttcaagtgtcacaacaagtagaatttttcacttgttcttcatttgatgaatgtggttgttgaaacatttattacttgtattaaattgccccgggcatgtatttgcttctttggtnnnnnnnnnnnnnnnnnnnnnnnnnnnnnnnnnnnnnnnnnnnnnnnnnnnnnnnnnnnnnnnnnnnnnnnnnnnnnnnnnnnnnnnnnnnnnnnnnnnntgtagagagttcactcattgtcgttgtcgtatcgaacactacaacaagaaactttttcgttggagcaagtatgtgcaacaaagctcttctcttgatggtgattgagaactttcaaatcttgatttcatttattcttcataggactaagattcgacagatcctaggagaatgtttttacaaaacaaatatctgacatagaatattaaatgaagtttaaactttcacttttaatgttgtatctgatcatgcttttatttggctatcgtctgaaacatcaaacgtaaattttgcaaggcatgttctgatagtgcacaaaactcaacttttaacctttgtatttgtttacttctaataaaaataattaaggattctgattcatcttaaggtacaaatgtcttttgacttaacatgtgcttaactctagtgtccttgacaccaaagttgaatttacacattttgagtcgaattttcatattttgaatttaataaagccaataaagggcctattttgtattttagagagactcaaacactcaaaaacatatttaggacctttaattagagttaagactataaataaattggttctgcctctttgaaaaaaaacttttgaatgattatgaattataagctttacataatttgagaaagtttgtgatcctttacttcatgagatagaacttcatattcttgtcaaagatcttaggattattgtggtgagtcctcatcgactttccaatcatttttttgtggtgtgtcaattcatctcttctcttatatgtttatgtttttcattttctttaaaaagaaaatgaattatatcactttcatttttttttgtaagattttgtttaaaaagaaaatgtttgttttacacaacaaaaatatgtcatggctacattaattgaatctaatcacaactcattgtgattttgctttcaaaataaggaagataatgtaggatagaaaggttaaaaatgatgcaatgccgaagaaaaaaaagagaaataatatttaaaactcatatcggactggtcaatccaaacaatttgattgggaactagaccttggaccgatcaaggcaagtattcaaataagatattctcataaattgatgatgatgttattagatcaaacagaagttgaattagattggtatgaccctggtgaccaaatttaaaagtaacacaaaaaataagaaagaagaaataagagtttctaagagaagaaaaattctctcaaaaaaaaaagagagaaaaaagaagaagaaatttgtagcatcaaacattttacatgtgataggaacacatgaacaaaaaaaaatgaactttggataaaaaagaaaaaattgatggacatcataagaatgtgtgataactgtatctatgttatgtgtaaatataatacaagataagaaattaagattactaatgagtaacaaaaacgggcctattagattgtataataaatgttgggctcttaagtaacttaaaatatttacaattcaccccttgtatgaaaaataatagacataataattgtgaactaaaaaaatagttatataattataaaagctttcaatattggaattgaagttttagcaagatactacatatagtaataaaatacctatatatcacatgtattattattattattattattattattattattattattattattattattattattattattattattattattattattaaatgtgatataaatttttagataaaaatacaagttcagttctcaaactgaaattaatcattgattcaattagtaaatattaaatattttatgtcaacataataaaaaaaattattatttttgtaaaaactaaaagctaatatttataagaacttaaaatagatttaattttaaaaaaatattatttaatgaatattaaattaaacattcatcattaataatatttattatgatttattagtactagttactagaaaaagaaaacaaaagttttacaagttgtccactacaagggacctacacttgactacgacatacatgatagcgccacgtgatccaaagtcatgtacacgactcctccccaagcctgacgtgtcaccatgagaaaagtcagataatctagagctccctttcgggcattatgtgccacgtgtcgctttctcattcgtccttcacatgaccgcctcctttcctttctcgtgtaatcggttattttattgtttctctctctgtttctcctctctttttcctccgttttctctttcttaaagcacaaaacttcttttcactttctttccttaccctacgtttccttcagatccaaccaattccatcgtcaccaggaacaccccttttgcctattcagctttatctcactcttcaactgtgtctctgataaggttcagcccttcctttgctctctatgccattcccgcaggtttgattcttcgttttctgactcaaagtttgcgtttttattgttgttcttgtaattttgattgtggggggttttcttcttcttctctttttttggatgaattgtgtgtattgagaatttttagggattttggatgtgggtctgaattctttggtggagtggttgattttgtagtagggtgttttgggcagatcttgtggtatttgttgatggagtgtttgtggattctacttgaatttagttcattgatgtgttgcttcttaattgggtggatctggtcgatagagggataatggatttgttagttttgggttggttgcaaatagaattgagggaaatttaaaatagggtattagttctagtgaagatattggttcaagtttggtgaatgtttttgttcggatcaagccagattatatatgtattagttctagtgattcttatttaatgttggatttaggttgttaggtgggtatggtattggaggatggtgaaaatgaaatttaaaagaattggccaatatcttaagtgcatgtttggctaaagcactgtggacactggatgtctgtttgattttttatttatgtgataaggacagtgtgtttactgtttaccggcttttgaataatttgtttattgtttattcaagaccgacacatttagatgtttgttagtcttaaactgtatataaatgcattgtttctgaatattctagtccagccatgtttaatatgacaaaatacaaaattatttgttccaattttgatacgaacatataaatttctccatatcttctgagctcatgattatgtgttcttatctttctgtgaatcttagttttcagatgtcaagtttataaaatttgatttgtactcgagacgtgtactttcatgtaattgatgatttgcatgtttctttatggtcttctggtttctttcatttatttgtttgggcctggttgtcattctctatttgtaaatgagtcgtgtctcttttgttttcgtgagcactttcagattttgatgattcgcatgctctatgtagcttactctgcagttgggaagggtgtacttgaacaagagtgtaattgcagcgcacagatttattaatagtcttgtagatctgttggctttttcaggatgggcaagtgcaagggttgtggaaagttaggaagaatgaggccaagtcatatgagcgcgtatgaattttctctgatgctggctcctgttgtttctgtttgggattgcatagttcgcaaaatgaggtactcctacagacctgagtgggtgtagtggttcagaacatatcagtagtattagtcttgatacttcaactaattagaatatatttagcattacaattagggaaagagaggaaaagaattacagaaaaaaaaaatgtatacaactctaaagaaattcacttgaaggaattctcaaagacgtcactttagtatttactatttaggtgtagtaaattctatggataccatggcatgtaataaagggcaaaccgtgagaaaggcgaagaagaagcaggtgaaagacgagttggatcgtcttaaacaggctgagaagaaaaagaggcgcttggaaaaagcactggctacttctgccgccattatttctgaactggagaaaaagaaacagaaaaagaaagaagagcagcagaggctcgacgaagagggcgctgctattgctgaggctgttgctctgcatgtgctacttggggaagactcggacgagtcgtgtaaggttgtgatcgatgacggtgggtgcaagacctggaactgcaaccgaactctcggcatctccttgggtggagaaagtgcttgcttccctcatctagatggtggcagatggtcttttgaaagagtgggttgggtctctgatgcatacagatatggttgcaagtggggtgctgctgaaaatggtgaatggtcattctcatcagagccttttgaaaagaatgtgcatggaccattatatgaaggtgcaggatggggacctgcaaatttctctgctgatctcattgcagctcaagcagtttcatcactgcagattgctgaggaggcagatgaagataggattctcttttaagtttttgattaagggcatgctgaggtgatagaagaataactgtttgtggtggtgactggatgaagtcttttgctatttttattgaagatttatatgcgtgtatatatattataattataattatgagtcttgtccatgtcaaacactttctgctccagttgtgattgaacgtgtaacatagtgtgaccatgttttattattgatcatcttttaactgtgtgttaatgtgaggcttctaatttcttgtgctgagtgactttttcagctaatttccaataatataaagctaatggaccccccagaatttttgtactactatcatggttgcctcatggattatgtcatcactttgaggattggcaatttgataatggaccccccctgaaagtccatcaaaatgtgttctgtgtttcttaatttttttttggttaaaattgaatttagtctttatatgttaaaatagatgattttggttctcattttttttaattggtctatttcatcacttattttagcattttaagttttataaagagggatgaaatttgccaatataagctaaggctagttttgataaaaaaaatttttttgaaagaattaaaacatgtttataaaataatagaatacatttgttaattactagttattatcggataattcatgggttgtttggtgaagggtcaccctttgaattctattttcaattacaaagaaactctaagctaatgagtggactgtggagagattgacacgttaaagtgtaaataaagtagtttgttcctattgcatgcattcttttgtctttttagggtcacttttactattgttcgaattggaatccctattcattggtagtttcgtttagtggtcattcctctcttaggaaatttcttagtaagtgccccatggtttcagacaagtgagcagtttttaaatgagtgcttgtcctttcatcattcatcagatatctttatactttttaattgtagaattaatttccatttaagtataggattttgccttcacaggaaaatacttaaagaacctaaaatacttatagaactaaagagcatttaatgcatcctcttagatattttcaattacttaaataaatattttaattttatttttttcagcttgtatctttaactttgttgtacgacaataaaatttaaagtctcactaatgtaagttaattaaaaggcaaattatgtcataattcattaagatatgataaaactatacctgatgtatatatttttaaaccttgcataaaattctctcaatttataacagcactataaatctttttgatagcattgatttcttctagttttttatgtagtcacgtgaataaaaaattaaatatcaaatataattttgttaaaccttaggaaatctaaatatattttattcgaaataaaatagctgaaaataaaattactctatttaaattactagaatattatatcttcaatcttctaaattatttatagggaaatgacagaacagaattgaaacgttcttttaatactattcaacaatttgagtctttaaaacctttttctataagagggtttatcattatttctttttaatttttaaacgacataatttctatttcattaaatgaggatggttaacaaaacatattctttaacacgtttttaataaattaattaaaagtgagtaaattatgtttttttttttacaaatttaacttttagttcttaaacaaaaatttcaggaaatatttttttaaaaatagttttaatctctattgttaagtaagagtgttaattgattacataataatcacatttaaaattcagtaactcatcactatataatttgacaggaacaatcatgtacaattacttttagtaaattatgtttttaattcatcatttgtttagatcagactagttaattcaggttagtttatcaaaaaaatcatatgttggtttgtcagcgtgattagttaacgttgtagatttaaaaacgtgattaaagttgttaacagaagaaaataagtaaatcgataaaaacgttaaaaaattgtttataaactggaagtgaaagttgtaaaaagtttaagaaaaaaaaacataattattccattaacgtttattgaaatttaagaaataatgaatgagattcatttttttagaggaatgaatgagattcattgatctacataaattttgtaacttttaataaatcagtcaaatagtaaggtgcatggggaaaagagtttgtttgcttgttactatttctccttgtcaaattcatcaaccgtggttacatgtgtatggcaaaacacgtagatatacgaaaagacaatgatgatttgagaaaaataaagcacatttcctggggtacaacataaggttgtgacttgtgagagaacaacattaatgtgaaaacttcaatccagcatcgaatgaagattcacatgagaaacatagtttctagactctccattgctcacacgtggattacacccccggttgtttcttttagctatatgactaaaacccatcatgccaatgccactaagcatgaagcctcagttgcacactcagacattaacccatataatttggattcaaccactttccatgttgcttgccaactttttgaggaaatgtctgacctaactgttgcatcggcaacgaccatgattcagggctttgttaagcggcactgccatgaagatgctatctaccttttctccaagatgttggcctcaaaaattagacccaatgagttcacatttggaactctgattaactcctccgctgcacttggaaatgttgttgttgggaagcagcttcatgcttgtgcaatgaagattggccttagttgtcatgtatttgttggtagttcccttcttgatttgtatttcaagcagagtactatagaagatgcccagaaggctttcggagatactcaacatcctaatgtggtgtcttatacaactctaatttgtgggtatttgaagagagggagatttgaagatgctttgcgggttttccatgagatgcctgagaggaatgttgtctcatggaatgcgatggttggtgggtgcagccaaacaggccataatgaagaagctgtgaatttttttattggcatgcttagagaaggatttataccaaatgaatctacatttccttgtgtgatttgtgcagctgcaaatatagcttcccttggaattgggaaaagttttcatgcatgtgctatcaagtttctgggcaaggttgatcagtttgttggtaattcacttattagcttttatgcaaaatgtggaagcatggaagacagcctgctaatgtttgacaagctttttaaaaggaacatagtttcatggaacgcgatgatatgtggttatgcacagaatggaagaggtgctgaagcaataagctttttcgaaagaatgtgttcagaaggctataaacccaattatgttacccttcttgggttactctgggcttgtaatcatgctggtcttgttgatgagggctactcatatttcaatcgggccaggcttgagagccccggtttgctgaagtctgagcattatgcttgtatggttaacttgctcgctcgctctggacggtttgcagaagctgaggattttcttcagagtgtgccttttgaccctggacttggattttggaaggcattgcttgcggggtgtcaaatccactctaacatgaggttgggagagcttgcagcaagaaagattttggatttggatcctgatgatgtatcgtcatatgtgatgttgtcaaatgctcattctgcagcaggtaagtggtcagatgtggcaaccgtaaggacagaaatgaaggaaaaagggatgaagaggattccaggtagcagttggattgaagtaagaggtgaagttcatgcctttcttactggagaccagaatcatgataaaaaggatgaaatttatttgcttttaaattttttctttgagcatttaagggaaaatgaggattccgatttgctcaacatttattggtatttcagttcataactaatgggaacagttctgtttgatatagggatatgcccttctgaattttaaaaagggttgaatatcatttgcttttagactagagtattctatttcttgaccaagatgagattggccattacttgccgtgaattgtgaaatacagaaactttagctgagtaattcagaggttagtaacaaaaactgaagccaatgctaagtgctgggctgatggcagagatttatgacggctttcttggtacataaaagctcattttcaacctctcatgctgacttacgtgatttaaggccatgcttcctggctctttattgttagataaaaactagaaaaaccgtatcaacaaacacatacaatagtttcacatagaataaaaaagtaatgtagaagaaaaataaagaaaaatagcaacagttcttctaggaaagaaattacaaacaatgcatacttatcataatcaacaagtacaaaagacaaatataggagaagtttagaatagcctaccttaaaacacgcaatgtgctatccttagagagaaaacactcaccacactggtagaataggatattatgcactgctctcttaagatagatcaacccattagatcaatactatatagtgaaggattccggaacaaatgaataccaatgctccaaaatgtttttaatagtagcaataaaaattattttctttatgtgtttcactttgtgtgctgtatctcgtttgtttatcagcaagaagcaaaatatataaaggacaccaaagccaaaaacgtgcaagcaacaaaaaaatcttcaatatgcaaaatagctgttaacataaataaaacaaagactaagttaaaaagcattcctaataaattaggaattagaaggattagaaaagataatgggtagtaccagtttttatctttagataaccgactgagaaaataagacattttaatcaaattttaaattattaagtaaaaatatttaccatcatttaattcctcagggtttagctgtaaaatctgcactgagattttagatttggaaattctcagtattttatgtcaatgctagaagttgcttctcataactgccttctgaaatcttatttggcatccagctatcatggtaaaactcttactcaggtgacttttacagtttcaccactggttgtgtattgtgtagctgaaaattttgttgataacggattatatggaatggtcatgctgaatgtagtttcatctatgtgaacccaagatatgcgtagcaatttttacctggtaagattttgcttaatttatgcagttttacttaagtggctcattttgctgctcttaatgggaaggggtgcactgttaatggattttttttttcttctgatttccaatataaaaaatatcatcaacttcaaagaaatgaaccttttctcattgatatgcacctttattttacagggaattttctccatagctccctgaaaattttctaattcaattttagtccaccggaccagccaccaaatttaaaaccttatactggagctcatatttaatgttctttgacagataaagttattaaaatttattgaggtcatttgatatatatttactttaattatataatataaatatttttataatttttaataattatttattataataaaatttacatattaaactcgacccaattgaatttattattattattattattatgcgaaataataattctaagactgctgagaataaaaaaaaagttagcaagatcgtaaaaaatgaaaccagcatcacagtaaggacaactaaaaatgaacatacattactcagcagtgagcactacctcaagggttgtctacatcatcttaaaaatatgccgcattacaatttgtgccatttgtatgtttgatcgcaataccataagccttaattttgctgaaaaacaagcatattatttgtgaatattgttttgatgaaattctgttccttcaaaccatactagaatgatatgaagtataacacaatctgctcttcaaaatacatcaaatccactttaaaaattgaaactcatcaaaatgtggaattgtgacaggttagtggactgagacaaatcatactcctactcgaaccattgggtgaatctagtttgatcaagtcagattcagacaagaaaagagaaaaacagtacaattacctttcaaagaacatagtctcacgaggcaccaataagatttgagttgaacaaacgaaaaattatacatttgatacacaaatgaatagcatgtaaaattccgttatactttttgtgacttaaaattacaatacacagcatgactaagatttgacaaagatccctcaactatcatgtgaagattaactatgtagcaatgccttgtcatctcgtgttggcggtagaggcataactccgttctgattctcagcttctgaactagtagacggttttgcaccattagtaacaatatttttcaaccaagatgcttgaagtctaggggaccctcctctgtttgaattgtcaggggactctggaccatttttaacattattagtaacattattggtaactcctaagaggaaccggtatgctactttgcttgctgatacaatctcagttttagcttgccggaactgcagtgaccagggtatgatcatcagtgcaatcatagagtttctcaaaatatggcaatactaataactacataatttaagcgttcaagccaaaagtacaagaacggccaggttgtggtgagataattctataattgattcttacccgtaatgctgtatttccagccacttccatggcagtatcaccagcattggcaaacctattcacccagcctgtcatggaagccgtaagaatatacagtggaagcaaaaaagtactgtacagaaacaataatttacaagatggatcaatgctttaacctccttcactaagcaagttagcatataaatttaaaatgagaagaggcaaattatcttatctaccctaaagcccaattacattgagtgcaagtactactgaaactaccaagttcattcttcgtgtataagcatatctatccccctgccctataacattaattgccttgactatatcatttcacaacttcctctccctatattcaaatgacacttgcagtccaagccaacaatatttctttttcttaaaataaaatgcatattgatctaaatagatacgttctttttctaccatataaaattagtaagaaaaccaatagaatggaacttgggttacagtatgataatgaacatataactatctaactggaattgggtttcgtcaaagataagtatctagttgactgggagaaacaacatctcaaacagagaaactttacaggtaaaatctagcatgctgtccgaaatcagtaaaagatggaaaaaactgtattcagaaagaactatgtattacagaggtgaattccgcaatacccacagagctaagtccaactccacactacttatagaaaagcacaagaactaactcccatctctccactacctgtcttcctaattcatattatagagatacatatgggatctctaatttccacttctacatcccatttcactcccctgcccctgcccccttctatttcttctgctatatgacttacaaaccaaaggcccatgacatgactgagtttgattggactaagactaaccaactcctggggccttacccataccatagaatttacatgatacatccctatataccgctaggccatcatcgagcaaaaaaataacaatgaacatcataaaagcaacattatagtaacatagttacatgtttacctggaagttttggtacaccaagcctttcacagaattcatcacaaaagtgattgcagtttttggacagcagatcatatgaactccctggccactctctactgagttctcttagtatttgatttaccttgaaaatggaacagtttgttttccctaaaacaatggattcacgatatgtatacattggattctttccagaagggcaactaaaaaccccagtaccttgctcacagaacccaaatgaccattcatcatctccaaaaacctgtcacagcagaacaatcttgaatatgtcagcacgagaaaaaacagaaggcctaccatatgtcaaggaagcagaagtgggtcatagaaaaaaaaatgacccaaaatatgcaagcatacaatatgaccagataaacaacaaacaagtaatattatgaaggcaacagtttctatttaagcaggaccacaatatcaatgaagctgcaaatgttgatacttcacttttccttcgtttgagaaaaaataaataaacaaacggacttcatcagcatatttaccaagcagaagtcagtaaaaataaaagataagttccttctgccatctgagtctgggagtggcaaattaacatataatcagataaacaatgaaaagagtcacatttttaaagtttcctacacttagtacttcaagtaaatgagttaaaattgccattcaaaattcccaaattaagaagggtacaagtcacagaaacaaaggttcacaccactcttagtttattgtgcttctcagaataaagaagattaaaagtctaagaataacttcgagttttattttacaaaattatgctcatagaaaaatgtcagacagtatttatcgtttcaaggcatactaacctgatatgtaactactcctgtcacatgtccccttgctttgagcattaatcatgcctaataaatgtgttcatacctcctccgaagtcctaaattcctcttgagtattctaggtcaaacaattcatctttacaagcaagacagagagtaatgcaatttgacttctattaaactacataataactgaattaagatttcacatgaccggatcaagccagccataacaaatgactagcacataccgagtcagagaagaatagcgtaattcaacgctggaacaaatcctaaattttctgggtgtagataggccaaatcctaaattttctgggtgtagataggcctgtcaattcattgtcaacaaatgatactaaagatttccattctaatttttcccagaaacacatacccaatcatgtcagttgcagccatatcataaataaactctactagccagtgcccatatctcaaatttctctcttcatttcagtatgatcacttttcacaccacagcagttggccagttacaaccacacactccacaggacctaaaaaccaccccaaacacttctcttgcataattacccaaggtacccccacttcattcaataaagatagaaacaactagaagcagcatctagtaaatctctgacatacaattcaccatcttcccaatccaacagcatacatgtaattcatacatgctaaataatgaatgaacatttatagctacacatataccagaaaaactgaaactcacatcataactaacaatcacttagacaccaaggtaaaaatcaattacaccgcttcatgcaaacaacacccaaacaaagatcaaaaccctaaattaccaaggtaaaataaatgaaactctaaatataacagtagagtcacacattggacaattacactcccccaatcaagtgccccacaaaacaggaagaaaaaccagatccaataaaccgtgtcaatcctcaaacaacaacaaacaagaaacattgatttctacaaagttttaagagaggaacaagacctgcacggcgctgtggaaaatgccaccaagaccaatcccatccttgaagatcttgttgatctgaacaatggtgttgttggttttctcggatccactattcgtcacatcgtatatatgcagtaccacatccgtcatctttccctttcacccaccaagacccaaactttaaacaacctcacttcacctttctctctctaaacgctattttcctatccgggtctctctctttctctctctatatgatttgattcagcttgaagattcaacaacgggtgttgttgttcctctctcttctcttttcgtaaattgaaccaagattcggccttgggatcccggaaaaccttccaatttcaccgtccaagtttttttctcgccggaatcgaaagattttcgtgtttctctcgtgaatttatattctaggaggagggaacataacaaggagagagagagtgttgtgtcatgtgcgtatgtaagaaagagaccaaagctgagaaaagaaaaaattgaaaagaacggaaaagaaaagaaaaaatggattatcaaaagacttttttgcccctcacaagttgtgaaaactacaagaaatgcttgtctttacagctggttgccactattcagaccctgttaggctaatgataagtgggagttagaaaatgtgggctccgcatgctcattattaacggtcacaagacaggctgctatccagttgcaatgacaggatagtcctctgttttttctgattataaattttgaattgttaaataagatataacttgaaaaagaaaaacaaataagaagaggatataagagtttagaaatttatgtatatgtttttttaataggggtactttatttataggtaaaaaagtaaatataaataagaaaagattataaaagataataaaagacatggacaatcataaataaattatttataattttctttttaaatgtttattatttaagaatgtgccttcttaaaatcttactaaaaaaaattctatgagataaaaatatagtgaaggaaaaagaatatatcattcttgaatacgtaatcttttgtctcattaaaattcttgttagaaaaattcaatgagataaaaccagggtgaaagaaaaaaaaagtgtaggctatatttatttcttcccctaatgtaaacaatcatctttaagacaacgaatttcaatctagtgaggtagttactcaaaagtcttccttagtaatgactttgtaaataaatcttctagattctcacgttaacaaatttgttgaacgtttatatcatcatttttttagaaaccatggatgtagaagaactttggtaaaatatattttgttgtatctcctttgatgtatccttatttcaattgaacagtacatgtaacattatctttatatgtgatcatcgatatcattttttctcatgttgagctaaaatttatgcataattaacttatgtgtctattttggcttatttcacatattgtcatggaattgttgtatcacttcatgtaaacttatgatgtatcattataaggatctaatacataacctctaaaatagcaatctacatgcttaaatgtctttgtattggtgaagaattatattttgctagcaaattaatgagaaatgatatatcaggtcgtgtatgcataataagatacattagtatttcaacaacaataaaacatgatacttcaagaccaaatacttcttcatcattttcttaaaatctagaagaatctcagttcacatttagagaccttcaatcattggaatgtacaacaaatgtgatttctcatataaaaccttttaagaacctttgttgtataagctttttaggacatgaaaattatattctttaaatattcaatttcccaaacagaattttgtgtttcctaggtcattcatctcaaattatttctttaatcaatctttagtttttggaagctcttcaagattttcaataatatttatgtgccctacataaataacaattatgaaaaagttattttcataaaaatacatagcaagtactcactaagtcaattatacctcatacgacttgattgctttagtccatagagagtattcttctagagaatatgcattattaggcaaattatatccttcacagaatttcatgcaaatgtcattatcaaaagagtcatataaccaatataagtaagttgtaacaacatccattatatgtaaattaagttattcatgtactactagagtgattaagtatgaaaagtactcacatccattacaggtgcatatgtatcttcaaaattaatgtcaaagtcatgttctcaatttcaccgttctcatttctttttgcacaaaaatttattgaatccaaccggtttagcatcttcaagtgaataaccaggaatccaaaaaatgtaatatattttacatcttcaaatatatggattgcaagtccaaaaacctaactagttttatgtcttcaagtatatagactacatgtccaaagaactagtttttcattttcaggtgaatagacttcatgtccaaaaacatagttgtgttttacatcttcaggtgtatagactacaggttcaaaaattattcgctttgggaagtgagtctaatattttctcatttgagtctttctattttggtcaatcatttctttgtctataatcctttatagacttactcttgatcctcgtcatcattatcatttattacatttaacgctatattatatgtaaatacattgtcaacattgactttttcggtttcatcatattacattcacaacaaaatatgagatctctttattttcactaattccaaataccttagctcttctggaactaaaatatacaattgtgttagagaaatctgtcagcattctcataatctcaatttgatcatcttactttttagctcattttctcaattgaagatttttatctttggaaccaatgtgtctaacacatttcatgtgttttctaagacccatttagcaatattgtccaacaagaacatcaaattttattgaagtattagtagttgatacatatgatttaaccacttattttaattaaactttataaatgaattatcttttttcccaaatagcttcgggaagtcatgtagcatacacatctataatgggttggatgtgcacccaaacctattaccatgtttggaaagatgttgcgaatagagaaaacacgtttaggtgtgtgctcaagcttttacactcaacataaatgcaaggtaaatataaacatgtcataaaatgttaaagctactgaaaatcactattttgaaatatataaaaaaaaatcacatccaaaacgtgaaaccaaacaggctaatgtaaccaaactcatgcttagacatcacacaaatgactttttcttcaacgacttccagtgatgtgcccgcctgcgattatgtctttttatcatagccacaatgtctaacttgcatgtttagaaaaacacgagttccaccagacaaataaatttattgctctaagaagcagtagggagcatagagaagagtgtctcaatagacaagtggaccacagcattcacaagttttttgtttgatattgtgaagctcagaaagaggagcggaggacaaactattattgcccccacacaatgcgaaaattagcaggattgtgcgcagtttattagcctttttgactgagagcttagaaatccatgcatagaataacctcttaaaggggttgcaaaggcaaaatggtggaaaccaaccttacctaagtatccccattttgttcatgtatgtggtcctacttgattaggaatcttatattttaagaggttggtcttggacctatgattgcggggtaatagtaatttgtgtgcgtgtttatgtaaattctgctatgcattattcaattccaatcttatctgaaaggagccttctctttctgttaagtagtggagtgagcaaaaatggggcaggccaatcacttcaagaaaatctagaattgaataagtattctttgacccttttaccagctgaaaaggaatttttacatattcttctaaagaaatattataggcggttgttgaatgagttcgattgacaagacaaacgtgaacatgctcacagatggtaaatgatcttctcatatgttcttgcttcagaaatatttggaaaaaataataagaaatgacacaaaagcacgtgaaatgtatatgcagttagctgcttcaaagtgtaaattcctggcatagtcttgaaagagacggatccgaagaacctacaaaatctcttagcaaataacttacttgagttatgatataactcatccgaaaacacaagattgggtttctatattagataagtttattcgtacttccgaaataaaatttccttacacagatatctaataggaattcaccctattgccgcattatcctataattaataggacatgagtgaattcctattgaatgtctgtgtaaaagtgcaaagtaaactcttaaaactatttcagtgcttctactcaatagcttaaacttttggggttattagttcataacatgatttcagagtctgcatatgatcaggtggtttagagattgatctttgctaccctcatttttctaaataaaaattaaatttcaacactaggtggatctgtgcattgtatctgcttcaagctcaaagtcctaccgcatgagggagtgtgttagatataaaaaccattcatgttcttgcattctcctgatcagaggataaaaaaatcttcactggagaagcttctatttgatcaagcaagttggacggtgagatagctaaccatggtgcctaggctaatggtacagtatttctcattatttatggcaggtatcagcttaaaaaaatgcaagtaatgcaggccagtgattcctttgaaccaagttcaggtcatccatcaaacttggatcttggaaatgtatatttattgatcatcctccaatgcattatttgcaacttgggagtctttttcttgcttatcacaatctcttaatacaaatgcatgcattttaactaaaaaggaccagttaataagagtttatccatagcaatagttcaagaatttagcatgtcctatatggtagaaaattataggtttgagaattaggtaaataaagaaatttagtatctagtatttaacctatcttctacagtagtcatctttgctgctcatgaaaacatttaaaaaaaagctattatagtattacatattgttatatgacattagtttatcaatgagctgcgactttggtaaagagttgcagccttgtgacgtggcaatctgtggttttacttgtggaagctgtcattgtcattcatggggacaagattgcctacctatcccttcccatacctcacaatggtgaaagccatagatgaagatcatggttcatattattttctcaaatgaattcataacaggccaaaacaagtaaataacagaaaatttaaaaaaatttattatgagaactattttacttcatgcaatatcatgaagacagacttggtctttcaactgaagcagaaacgtaagaaatagaaattaatgatagaaccaaacttataaagtttgcaacttataccaattcttctctcgataaatacagagcggtaacatagcataaacggataaggttatactatgataaatatttgcatctctccaatgtcagacatcatgaaaataaagattatacaaacatccgtaagaaactataaatgagccttgcctattactgccttccatatgtaaatgttaatattggttttggttcaattttctttaacaaaagaaaaattataaagaaaataactatcaaagcacaggtaaagattgatacctttatttccatgtgaaactttttatacatcagcaagaatagcctctatttgcaggatatttctatctctatctgccttcactgttcattagttgagaaaaaacttcggtagcacttatgtctgaataaccattaccattatctccctctcttattacgttactagaaggactcccaggaattattgtagttgtcacattcactgtttcccgagcactgctatcatcatatgactccccttcttgttcactttcttggagctgaagtgctatattccaaattccacaatacagcacccattgttggcctatctacaccatattcagccagacatttttctgctgtttcaccaaacttcttcaaagagctttgctttatcttccctacaagatagggatcaataatatgctccagcatgccctttttctgccattcaagcccccattcggctaagttcacctgttccctatcaagttgtggatcaacagcaggtctggcacaaagaacctcaaaaagcaccaccccaaatgagtaaacatctgacttatctgtaagctgctgccttcgaaaatactccggatcaagataaccaaaactacctttcacaccagtgctcacatgggtttcattgagacaaggtccagatcttgaaagaccaaaatctgcaaccttggccacatagttttcatcaagcaaaatattggttgatttaatgtcacggtggatgattccttgcacgaaaccagtgtgtagatagtggagacctctagctgcaccaatgcatatctcaagccgctgcttccaagacaaaggtgcatgtcctgctgagccatatagatgctttttgagtggacctttttccacatactcatagacaagtatcatttctgagttttcttcacaatatccaactagtgaaacaagatggcgatggcgaattttggaaaagattgttatttcggtctggaattctggaagcccttgtctggatccaggcatgcctctcttgactgcaaccttcacgttgtctttgagcacccctttgtaaaccataccaaacccaccagaccctataattagacttctatcaaaattgtttgttgctgattgtatatcggcaaaagggattgtcaagccaaaataaccataagaaccaggagagggaaaagctgtcccttcagacattctactaagtgaactccctccgtacacgcgtaaaggcgtccatcctacactttccattgttctttgtcttggcgttttcttcttcttcctgcatttgagagaaagcagcaaagcagctataacaaaaagcaaaacaacaattcctccaacaattgaactcaccaacacccacaacctcttcttccttggaacaacatgtgagtccacaacattcactagcttcattatctctacaccattcaaaatggcattcatccttgcagaactactcagttcagaagggccaacacttatttgaataacacccaattcattggaatctacaacaaaatccacatagaacggagatgcaagcacatggacagtaagggatgacaaatcaagatccttgtaagcataatacccattgatatacacatcaaagtagagcaaattaagagcaggactaacaatatcacagaaatgcagccgaaccaagtgccgaacaccacctggagccactggaaaatcccaggttatgttgaactgtgaagcaataatggagtgatccttattcatttcctgagcagtcatataaacattatccggagcgatctctcgagtcgcgcctcccttctggtaatttattgtgtgagtgctccccacacgcttagcagcatccttaagaaccagaaattcctcatcaggaatccaagtcctccaaagggtgtcattaaaaggagttactttcacaccccctacattaatcctatgcacagtttccaaaacctgagatgaaaggttcttgtactctaccacaccagaaggaccaaccaacctagctccataatctatgacagaatcagcaggagcagtaaacacctctacagcattcacaaagccaaaacctgaattaccttcaggtctaaataaaatttcaagcaaatttgactctatcttcaaaataaactccttaagcagtgcaccattaattggcttgaaatttctcagcaccaaattaccatcaaccaagacactaaagttggcagattttagatcaaatccttgagccttaaaaggtgaaaaatgaaaacgaaccaagtgggtaccatttatcctcatgttgaacctgtagctcccagtgatggggaaaactcttgcagtgtggtacaaagtaggcaaatttggaggagggtcttggtaggtgagggaaatggatttgtcagcagagagaaaaattgagccatggctggtggaatcactgacgaagatgcggttgaagagggaagcattgttctgtgatccacagctaagaaggtagttatctatgggagtgaaagaggatgaacaagaaatgaaaagaagaagaagaatgaaatgtataattagcttttgagtctccatggaagatggaatatatggtctttgaggagtttgaagctcacatggaagaactggaagctgggaaaaaatttgcagtgaagactttaaaaagaaagaagagacagataattaatgtacatcaattttggtcactcatcaagtcaaagggttgccacaactattcattttcttaatggttatgtttaaaaagcaacatttttggatgcttcacacaaaatgtatcttctcttactggatgctggactaaaccaactgtactagattctgtttggttcggtttctggtccttagatttagcaggtcctttatgaagtaataaaatataagagaaagtgtgaaacaaagaaacgattacatagtttatttgtaattaaaaatgctgagatcatttgtttttgtcaaactaaaatccaatttttatttggatacttgtgcgcctttggaattggaaggatggttatacttaaaatattgttcaattgtttggggaggggaaggattttaatagtttaataaaaaaaattggatagtaaagtagtaattatcttgtcttaaatgagagtccggaaaatttagtaattgggagaaagataagtgaaatgttagtaaataaatggtacgtgtgatttaaaaatgtatatttaagccaaaaaagtatatattagacgcatacacttgaagttaatggtaatcctatataggttggtttagtggtaaaaaatttagtagattgataagatcataagtttatcctcttttgcaccatattatattatattatatatatatatataaacaaacttgtagttaacgatgttttgttaatttttcaaccctttcttttatattaaagtaaaaaaaaaattataaagactctgttttcaagcttttgtttattaaaaaatgttatttttttaaaattgacgtttttaagaagagaaatgaaaataaagtaaatcaaatataaaacttaatacttttataacacaatcatgaagttctaaagtgtaatttcgctgacgtgctaccatttttttatcagatgacatgctaccatatgctaaaatgtaaacaatttagatgggaaaaaaaatatgtgctgcttcttgagtttaattacattttatgggaagtaaatactattaatttccaaacagacggtgtggatagtaatcaccttccagatggcatattgtaggaacaatttgagtgtgaacgatcaattagaaagctaaaagtgctttacaagaaggataaatagcacactgtaatagtactgaatgttcattcaattacctttattgacagaaagttgtatggtgggcttatttgcttctagtctatttagcaatcattaatggcccagagtcttgtttggttggcatctttaattggttgaaaagaaagttaatagaaattttgatttcaagtaatgggggtttggcttccttccactactgttcacaaattttagtggggggaaaaatgcatcacactgcataagttaatattactttttctaattcaataaaattcccaactattcttttcataaatttgttattttagttcatttagtgtgacgtatatctgtctattatttaatatgatacaatctaccttttcataacatatatccatcaccatagaaatagatattatgaagcattcaatcaagatttaatttcattaaatatgtttatccatgctattttattcttaaatccatgagattatataagataatctaaaatattttatcataatttttttattcaccaaaaaatttaagattaattaaataataataaaaattgataacatgattttcttttatcttgagttagcgattgtgagtgttttcaatcaatcactaaatcaataactaattttactgatataagaaaattttatacataaaaaaataaaacataaatgctcttattaaataaaatatttttctacgtgtgctagtgtgacgtttcactattacattaacatacaagttagttaataacatgtttaatgaaattaaatcttaatataatatttattagtactcttaattcataaaatgtatttctatagcgatgtagaggccgtgtcattttaaataaaaataaatatatattatattaaaccaaataatataacaaaattttgaaaatagaagtcaagaattttattgaattaggaaagtaagcttaaagcaatccccaattataaacttatgtagcttctacttgagtataatgacatatgcatgacgaaagcacagctaagaattactccttatgtgcataaaaacatgcatgtgcaaatgtacactcattaaatgtgcaatggtacattcatttatattgtacagaataattgattttttgaagccgtatataataattgataaatatctaagaatttaattgtaagctatagtgttatataggatcttaagaggcaaaaacttctattttcttgctttcatattgaaaatattaattttattgttttatccaatctaaatgatccattaaatcaaattaacaatgttccaaaatctcgtaattttttcgaattcacctaagatcaataaatcattagtatgtcaagagagattaagtgacctaactttattacataatggttaaatagaatttttttttttgaatagttgaataagtaatttttaattccaaaatactcaaaatataatttgaaattaaatcataactagctttaaaaaaaatcaacttataactattttggttaaatagaattttttttgaatagttgaataagtaatttttaattccaaaatactcaaaatataatttgaaattaaatcataactagctttaaaaaaaatcaacttataactattttcataaattatttaagaaatgacttatcttaaacttcattatatttagataaacattggtatggtgatcttgtaaattgtaattaattttaaataggaattttcaacttaataatcaattttaagacaaaatcatgtagaaataaataaataaattgtgaagcacaatacgaaatggacattggattatgggcctgagcccatttcatcaagcccagttctgtggaatggtgaagcaacacgaccttgttcgtttcttcttcttcaccttagagagagagagagagagagagagtaaaaccctaattcgttgctttcattctatttaccacaatcgaaacccccattttttataaaacggtaactctctccctttcttcgtattttactttcataatattcctttagcacctacaagttagggggaaaaaggtacattagatgtgtaatttggggataatgaaatggattgttaattgctggatacagaaattaattggtggatttatcgggtagttagtcatcctgtgtaattcaaatgaggatttttcaaggttttgctttttccttttttttaatttttttatttagactataattttgctcttgaaaccatttggcaaaattgcaaatttgcttttgtagcatggatgaattccgttaaaaattattcatttttcgcctttggctagatgaaaatgccactgaaattatgtgcacctgggtaatttcaaaagtgtagggtgtggcaagttgttatttaataaaacttgggagttgtttatcttattgcctctttcagtcttgttatttcaaagagtttaatttatatacactactggcatctaatagaaatatatcttatcactgggtcatattaataaataagatgatgtggtaaattggtcaaatattatgagataatttgggtaaaaaatctttacacagacaatatataaaaattaaaactcaatttcaaatttgtaactgcactgcaaagtattgcctcttatgttgactaagtgatgattcatgattgtacagcatggaattgcattcagtgaactagatctaagtaaccccatattagttgataatgtcaatgatatgtcagaacatgctgttttgagtacaatgtttaaacttaatgttatggtggattgttcatgtgcagggtgatgtacattctatgattcagagttttggttgaaccttcacttgtattctttgctgtcatggtatgttcaatgtctaatcacttaattatattctgtctgagggagaaatgtctcatgttataattgcttgtctgagggggcaaggttttgcattgttctcgatttgtcaatatgattttccttgtcgaagcatcacatgtattttttttttgtgtgtgtgcaagggaaattaaataagatgtaagtatgtagataaaagaagaaaatctatttaactggaaaaaagtattacaaaagggactaaagatatcctccttaaaatacagcagcaaaagagcacatcccatcccacattcaggaataaattcaaatattgaattcttagggcggtttattgaattaggattttaaaagacttttttagaataaaaaaatcttgtggattttaaagactttatagaaacgtaatgacttttaagattttttttaaaagacttttgtgattgagattttatagtttggattttaatggatttataacatgaattcataagatttgaaagaattttatgaattttcaagattttaaagaattccatcaatttttagaaaatattcaaaattacagtggaaagaaactttgattatatattgtctggtcttgtgttgttgtgagcttgttaaagatgctgtgtagaaagatttaaatatatgggctagttgtttcatttgaagttttggtggccaaaggttttcattatgggataggcttgagttatgctggaaaacgaattccctcgggttattttcctttctataactcagggcctctttgtcatggtgtaaaaaaatggtattggtatctgatattgcctaccaaaaaaagccattgatgttaatgttttgcatgggaagacttgaattcccaaaccatgagcacatgcatctacagattgaattgtgaggacatattttggctatgtctcgagtaattttatattaatataagaaagtaaagtttgatatcaaaagaaagaaagagtctaacaaaatttcaagagtttagatgagattgtttgatgagtattttgtattcaaaagtcaattaaaatccatcaaaatctattataaaaaacaattcattaaaatttatatacttttgaatactaaaagactttttatgagttgtaaaaaatcttaatttaataccaaccgattttattgtactctttaaaaaatcataataatcttgattaaataccaaaagacttatttttattatttaaaaatcttaattgaatatcacttaactttttcatcataaaagagtcttttaaaattcatcgatatcttaattgaatacaccccccttagaatccacttaattaatatttatatgatagttcctaaaattggtcgtttggattttgatgttttgcttgtcattgttttctagcacttattttatgtatggctgaatgcaggatcccaatgatgataggggtgaaagtagactctatattggtaaccttgatcttagaattacagagtgagacttgctaactactcaccaagagttaacttcatttttgttttgtgcttcatgcacatactgacatacttactcttttcttttcaataatttccagagctgctctgcttaaaatgttttctccttatggaaagataatttccgaggacttcttatggcacacacgaggcccaaaacgcggggagccacgtggttttgcttttatccagtacagcacaaaagaggtaagttgattgcatacattagttacatcactttctagcaatttctgatttccatagttaaagtgagaatgcaggaagcagaattagccaaggagaagatgcatgggaggttagcttgcggccggccattgtttgttcgtcttgctggtgaaaagttcatgttggaaacagctgataactctacaaaagcagctggtgaagggcacaagatgcatctcactggtggtggtggtgccatgggacaaacaagtcgacatgccaaaatagctgctataaaaaacaaattgaaatccttagaggaggagagttctaggtccaagaaacaaaagcgaagtgacaatatttcttgagtcaattttgtaagtatataatatgcagaatcaagtgataattcaatggcgtataaattgaatgtgttgcaattgtttgtccccattaaattggaattcacatatttagttaagccctttattttattttattttataatttaggccattagccattgttactgcggaggcatactatccatatgaaattttccaaattgaaatttaatttgacattctgtatgttttttatccttaagatggaatattaattttaaatggaatggaatcagaacattttatgtgagttcaaaaattctgagtgtgagatcgttttaaattgatgtttttattaataattttggaatattttcttttatgttttgtgacgaatatgaaaataagaaaaaaatgatatttttttctttaaaagccctttaaataagaactcacattaaaaaagaaaatatttatataattaataataatgtcaattgcaaataaaaaataagatatatttaagaatgaggtcttaaaggagagaaaggctatatttttttcatttttaaattaagtttaaaaaaaagaaaaaagatcaggacaataaatttagagaaaaaaggttatgttgacataataaaaagttttatataattatctaattacaaatcaatatgaataataaatttattaatttttaaaataattatcttaaaataatttaaaatgtaaaatatgattgacgggatgataatataaatctattttatagtgtctgtatgcatctacattaaactcataaatttatgttgaagtgagaagggataactcaattgcaatttaattggcaaacgttagtttgttgcctttctcccttgaacattgctattgccaattgagttagcttttagtattttctttaggatatcttttagccgtttaagtttaaagtaacaatctgccgtataatttttttacacggttatttaataatactttattatgtaagataagtttattgattttttaaataattaacttaaagtattcaaacggtaatttgtgattgaataatagtgtaaaattatttaatactatcatgcatagacactaattatagtttatataaattcatctgtatagttattttaaaaannnnnnnnnnnnnnnnnnnnnnnnnnnnnnnnnnnnnnnnnnnnnnnnnnnnnnnnnnnnnnnnnnnnnnnnnnnnnnnnnnnnnnnnnnnnnnnnnnnntagatcagggacgtgatagtagtgtttagttgtatgcactcttattatttattttatttgttctctaaacgaaaacataggtctctgtcaaaaacaaaatccaggtctcaataaaatttatattagaggcttaagataaaaactgttgagtacatacattttattgcgtcttatagcatatccttatagaatatgttttctttgacaaggaaagcatttagaagagtttatttgaatttataaaaatagcttataacctttatgtaagctttttaaaaacttatattaatatgcttcacgaggaaacttattatttttgtttttcaaattatttcaaaacattttgtaaagtttatccataagttctaattagtgaaaccttattgagtaagttgcttaaccaaatgtgttttcagagtgaaaatagttatcaacgatttgaatagtttgaaaaggaaaagaaaaaagatacgattacaaatttcaagttttattttttcatttatgaaaaacaaaactaagtcgtttacttgtccattatttggtggttgagtgatggctttttataaggaaaaacaaaatgcttatttatcttcaattaataaatatgatgtgaggaaaaaatgtgaactactaaatgtgattaagcagaaaatttagctggaatctttaggtgccgataggaaaaagaaaagcaagtggttctatgttggtgaggtttggaccatttgataattgcagtgacctagttgtagaaactagaaaaaaaaaaatcctttccatcagaaagtcaaaaatcttaactatgatgattataaaaaaaaaacactttgataagggaaaacctcgaaggagagatctatttcctttgttctattcttttgaaatcaagaaatacattttttttagtatgggttccaagcacatccctattttagtaatatatctttcctgttttccagcatggcgtaaaatgaggactgtagctatcatgaaatatgcttgcagcacaattttgaatcaaaaaaatatggaatctacataatggctgatcattgttctaaagaaacacttgatttattaaataaagcttgatttctttggttcaatgtttgtagaggatgctttcctacttttcgtccatatcacattatagtattagaaagcagtttctataggccaaatattacgttctgaaataattttaaatgacctatggttctacacttccactttcaaattggtactatgaaaatttcaatatcatgtgacctattatatttaacatgagatgtgtttcccagataattttgttgtgattggacccagtggaagtatatgaaaggttatgaagactgccccgataatcacagcaagaataaaatatctgcatcaaacaagtacgcctatgcaagtgctacaagggtgaggatgatacaaaagtgaaaagtctgagttgcctatatccatccatttgcaacattttagtggatttcctttaacaaagcaacaaaaaatatagatattatttaaaaacaaaaagtcaaggtattaagctaaagttttattgaaagaacataagcggatgatactctttcacggaggcagaaagttactagtaaataagataaattataacaaagcattcatagattacagagatttcatcaaactacagcaatagaaatccttcaacatttatcatctcaattgtttttctaaacaatgataaattgaagttctgaatcaatatattacgtgttttttgtactaacttgcctaagttagtacaagaaattaactattcaaaaaagtaaaaatttaaacaaaaattaagtacaagtacccgctttgcagatcatattattcgggacttcaaagaataagaaaccttgcagatttagtaagatttggcaaaaatagccacttcttcagcaggattgccggtcatcaagcaccttttaaccccttgtggctgttcaaaaggaaaacacctaattgttgctccagtctcctcttttactgttaactcatcttcatcactgtaaaattgtgtaaagttttgatatcagagctgtgaattaattatgttccttgtctaaacatcttggaaggtacattttcaacatcaaaacatattaatagcaaaaaattaagaggggggggggggggacaaccttgcagaccaagggccccttgcccatttgccttgtgatattgctgctttaagatcatcatatgtgctcacatctacaatattactgcaagagaaaaaccatgcatgtcaatttgactgtttgccagtgaagccaagaacatgtgtgcaattgaatcagcataacatgaaaacaaaaaatttaaaaaaatgaaccttaataacttaaggaaaggcaagaagccattgagtttgactgcattaaccttttattagtctataatttatgattttatggaaaccatttgtaggaagtggaacattttaataaatataggaaaccctcattccaattggtagccgatttagaagagattagaatagttattgtcaacaccaaagcattagaaacagctcttgatgaagttctagtagagggacttggtttggtcagtacagtaatacaaggtgcagatatcttatttagaggtaagatctgaactttggctagaagcctagaaccataccaaactcaaaccatatatttgttactgaagccaaaatcaaggcaaaagtataccagtggaaattatccaagcaaagtacaacattgttttgacagaacccaagattatgcattttgctaccattaacattcttcaattcaggaaagatgattaatgtgactattatcaataaataaatgagattattttgaaaaaatcaattcaacgcatgttagacaaggttatgttaaggagttccaggctaaaagtagcattaaaggaatgaacctgtctcgaaatgcaattgccctttccaaaagagatgactgtatttcatccaacttgtctttaacataagcctccaaatttaaaggctccatagagattccaaacactttcccttgcttcccagggatatctctcctggatatcaccacacttccactagccacatcacgaggaccaatttcaattctaagaggaactccctaaatatgaagtaaatgatataaatataatcaaacactcaaagatcctgcagcatgagccaaagcaatgcgcattatttggtcccagaaattgaatttccattcaagtttaaaaacaaaccttcatttcccagaaattgaatttccatccaggagttctttgatctgagtcgtcaagtttaactttaatcccagatctttgaagaacatcttttacagatgatgctgcatttagaactgcctctttttcatcatccttcttccaaatgggtacaattaccacctaaccaggcaacacacaccatgattttgtcaaaaatgaaaaacttataatttatttaaattacaatataaaagtacaggcatggaacataatcctgtatctgcatgtaggagtttggacttcggagtagaagagtctttttcattttaagtaagcattccctttattttcatatttgcctgaccaaggagcaaagtattccaactttcaacagcaaaatttaactaatggtgtctacacatcaaggttaagacatcaatagcatccaaatgtacctgtattggtgcaatctttgggggaagcattaggcctgcgtcatctccatgtgtcatgatgataccaccaacaaaacgtgtactaattgcccatgatgtctgccaaacatattcccttaacccattttcatctgtgaactgcacaagaacacattttgatcaactgcatcctcattaaaaggattatattaatatttaaaagaaaaaaaaaaaaatatatatatatatatatatatatatataagtacatcagacctgtgttccaaaggcacgggcaaagttttgcccaaggttatgactggttcctgcttgtaatgctttcttatcacccatcatagcctcaatcgtataggtcttgcaagcaccggcaaatgtttccactttagattttcgacctgtaataactggtattgcagcttgctcatacgcaaatctggtatagatgtcaatcatctgtatagcctgcagttgaacagaatgtcgtcactaagattatgcaattatactagtaaagatttatcatcttgacagaaaagaagtggacctctttttctgcctcttctggagttgcatgagcagtatgtccttcttgccaaagaaattcaagagttctcacaaatggtttagtgcgcatctcccatcttgtcacgtttgcccactgaaagcaagttagaaaaattgtcccatcattcaacaaagcaagttcttgctcacaaataaactctcaacagcattacctgattaatcatgagaggaagatcacggtagctatggatccattgagtaaacatatgattcacaatggtttcacttgtaggccgaacctgccacagcctcaacaagtgcaaaattcaaagacaaaaccttaggtcacagcttttcaatcaatattacagatgattaatcacttcaattcatctcatatatcacaacaaacaccgaaaaacacacatgaaagcagttgtaacaaacaactgaagagcatacataccacgagtttctcttcaagttcctttccacccccaattgtaactagtgctaactcaggactaaaaccctcaacatgacttgcttctttctctataaatgagtatgggataaactgcagaacagatttaaaaaaagcatcaaaatgatagtacaataatttcatattgtggacacattcttatatgccccattatcaagatttcactttgcagagccattagtttttgacatcaaatttaatatcggcacactggtaataaacattccaactccaaccccttcacaatcattctctcaactattaatgataccatagaaatacttgcataaattttagacaaatatatcactaaggaaacatttaaaagagcttatactgagtttattttgactcgtgaaagtggcataggacggggaaacgttggggtaaacaatttaatttaggcagtgttaggataaatttttcagtaagcacttatagaagaagaaaatatgaaagtaaaatgaactaagtcttaaatcaacttatatacttctatagaaaatcgctcactttaggttctccaaaagctggttttaaattatgcataagttaattttaacttacggaaaaagcttaattttaccttttcttataactctttctggaaaaaaaaattatccgaaaatgttagtttgttagatgtaggtggggaattcgaacccatgacctctccctcccttcccttctcctttcacgcttaaaagggctttaaggaaagtcataaaccacttcaaaaagttcacatcagctctttaaaaaatacgcattttccataagctcgtatcaataagcttcacgcagtgaagcttgtataagcttatatcaataagtccttaattaaactgtttaaccaaagacaccctaatccaataaataatcattaattaattatggttgttaacttttacctgcggaaaatacatgttactatgtccggtctccttgaacttcacattcaaatactcctgcgcacacagaaacaaataaatgaaaattacacaaattgaacagaaaagggacacgtggcgagaatttgagaaggaacctgaatggcttcccaaatggcgtaaccgtagggacgaataaccatggtaccgcgaaccggaccgtaatctgccaactcagcattggctatgatatcgaggtaccacgcattaaagtcctgtgaccttggcgttatgactcgctcggtgactcggttcttcgagttctcaactcggtcctgggtctccgccgccgagctctgggccgagaacgacgccgcgagtggccatggacgggggtggtggcgccgcctcagaatcgccggggagcggcgagcgatgacggcggaagagggcggggagaagaggtgggtgaaagaggtcagcctgagagacaacatttgcggctttgaagcagagtgcgaaagagaagagagactcaagatgaggttttggtttcatgaggttttatttacaatattattattaaaataaataaataaataaataaagggatttgctaactaaatttccttaaaatacatattcttaacttctaaaaaaaatgcatgttgacaaacctcataaatagataaataagaggaaaaagctagcaaacctcataaataaataaataagaggggcttcacttgctttaagactatttaatattttaatttatatgtaaaataacttgaaaatgactatcatcttaatatgcatatttcctcgataaattattcccataaagtactggttatcctattcttattataataacacgaataaattagtttagttattcataaattgtgatattaaattgatcatttttttttcaatataagatattaagggtgattttggtagaggtgaaatgataagaaatgatattaaaaacaataaaatatttgaattaaaataaaatatagaagtgtgtgatgcacactaaattttaaaaattttcactcaaatttagtcaaacatgaaatgaatcaagcagtgtctaagaggattacatcttactctagatcccaaaatataaaataaatgtcgaatttttgaaaaaaaaatatttatttattattcacaaagtccatattatattaattactcatttatcaattatacatttacttatctcttaatctctaaataggttacacatttattgtgagatgaaaaaaaaatagaaaattctataattcacgaactacttttttgatgtggataattacgaattactaacttctcacattaataaattaataaattaataattttaaaataattaatcaaatagtgattttagtttaaatatttgaaaatgcatactaatgtgttacataaatagacataataatatttatatatttaataataaaatttactcattaaaattcaagaatttttccttctcctttaataatatattttacttttttaattaaaattccattgtatattaaaattttgttttttcttcgttattacccaactcattagtctttctggttcctttatgtaattataacatttgacacttttccaaagtgtattaaaagtcacatatataacatttttcatgcctaccattgaacacattttttaaaaaagtagaacgcaaacaatcatagcagaatgaaggttaccaatacatactcaatgaataacaatacctacaccatatatatatatatatatatatatatatatatatatatatatatatatatatatatatatatatatataaagaagagaattaaaaagatattatttccttctttcattccctaggggtgttattaacaatcatcattaatgcaacatggagaatgaagagtcacaaagttattgagaagataaatgtacttgatttcaatacatgtttgcaccttaaatgatttcattaaaaaaatattttttttattatcagccattataataaattttctgtcatatcctcattttaggcgggaaaatgattatgcaacacttccttccttttatatataaggattcactttttagtaaatctttttacaaatattcacatacagaaaagtgtcatataaattataataatgcatcaccgtatattatattacgtgacagaccaaaaaaaattaaaattaactcagtagaaattatgtaacttatttcaatatctccttatcacaaatatctgaacacaagatattccgttatgacacataaaacatcactagtagaaagtcataagtttcggtaaatataaaaaacttaaaaaaaaacaaattatccaagaaaaatgagaatacgaattaatttgaaaaaaaaaattaaaggggcagagagcaaaatcccacatggccacacaaatgagaggacaaaacaataaaaggttctgttttgttttttcttttcaaaacacacttgtgagtttaggttgtggtttagtgggaccaatatctagagtaaaggcccatatagttgaaaagcccaaaagtttgaaaggttatgtagctgaaagcctacatgaccacgttggccaagtatttttttatatatataaaaaataagttagatgctaaccaaggttaagattagaatttagaagtgatataatcatataaaattaatttaattcaataaaaatctgaaaaaaaaatgatgtaatcaactattattatgtaaacttcgaatatctcttaaagagattgattttttgttttattcatatatatgaagctgagaattaaatttctgatcttttatttaaagtacaaaattatctgtctaactatatatgccatacttgattaattagatgcatatacttttgtatggaaaattgatcattatgagacaggctaattaacggtgaaataaaaaaaaaaaaaaaaaactcagtgccagctatgtggctgatgttactgtaatatatatcactttttccctcatttttctttataaaagaaaaaaagcttaaataattagatggtcgatcgtaatgaatatgcctaatacatttctaattgatttgattaattaccatactctacctcaaataaattggtagttagtaaccagccaacttaagttgaggagaaaaggctcacagtattctttttgcagctatcaacttcatacccttgcatgtcctgctaatcaactgtagttcatggccaatcctatgaaccagaaaaagagagggcatatattgaataataataataataataataataataatacaaagtgacaatatgtagatggactatatattgtagtgtattgaactatattgtagattttacgtactaactaagtacctagtgtaaattattttgatatatttaagaatttgtttcatgaacatatcatgaaaaagctacaaaaatgactgaaaaaggggtgtgaaaaaacaattgctctagctgtgaattctcttgttgtcctgtaccacatctaggctatatgtcatcttaccgtaagtgtttcaaactatatgtcaatatcaagataataaaaagttctttgttgggaggacatatcccatataagaattaatcttacacctgaaagatgtgaggttgcaaataaaataaaataagttaaaaaaagataaaaatatggattgagagaaaacactactattttgttttaaaataattatattaaaactaaaatttatagttaggatattattatacaagtagccagagtttgagggaaaacacagcaactaaataaatcatatgtagattaatctttacatttcaaatgtgtaggagaatcttgtaaaaaaacctaattctaatttttgaattacaaacattaagatattttgaaacatgttataaattttatcctcacgtattatattaaattttacttctatattgatgtcaaatcaaagagtttttcttgtttatatgagtttcagaaactctaatcataaaaaaatcataagtctatgtaaaattaattagcttagatttgatatataataaaattttatccatgtttattactttagctttagatgggttgtctttcccaggagatgaaatgtctttctagcctaaacaacaccactttacatcatatcaatagtggggaaaaataataataaaacttacagcttcggtgcgtgtattacgcatctctctctttaaaatcatatcaaatgaatttatttaaataaaaattgcaatttgtttattctgcagaatgcagaaaaagtatgtatacacatgttagacaatcgcaaccaaacatgcatgcacttaatatattctaattttatgatagatgtatttttccccaaaacaataaacacatctggttgtattattttgatatatattagttatggtggcaattataaacctcctataaggtcaaattacgaatgcaaaataagaaatatttactatgaatgttcatatttttaactaaaaataaataaatgaattgagtcagcttaaaaatttatcaggattaaagcatacctcaagaacagtaataaaactgttaatttcttaatagattaaaaaatatacatgaattctttaataattatgccacaattaaataatttttaatgttattcttaagcattaaccactctaaaacacacacggtaataaaaatttctcataatgataccttttaaggttgtagaaaacacatatagattaactatggctttgtacgttatcaacttatgatgttgctgatggcaccatgtttgggttccctagctatctcctctgtgttctactgactaaagtgttaatatcttcaatgataataaaaagaaaagtgttgatatcttcaccaccacacgctcttctgcgcttccaagatttcttacgcaaacaagttggcatttattgttccaactacaaatttattcatagcagattcttatatcttaatttaaacaattatattttcagttaaatcactcttgttaaatgttgctctattgtatataaacagacagtgtctctacacaaatcagaaaaatgtaatatttttttttacacatcacatgtattatttattaaagataatcttatttttttacttaaatatttaatatagttttaattatatttaaaattcaaactctaagactattaaattagaataacgtttaccaattattcatatgctcaatatattttataccactttcatgtgtagggtatattttttatttgttgccaccatcaataatttaaacaacacaagacaaacatggagtataacacagactttaaataatattttttattcgttgcaacatggtagtgactaatatggccattttttatgtttttttttcttccaaaattctattattgatcagcatcacctattctcccatgcttttatgttttactatccactgtttgtttggtaaagattttttttaaaaaaaaagaagattccgttgttccagccataaatttgtcctgaacaacaacatatgacagatgtttgataaaaattagaattaatccttctaagaatcaaaagtctttagaagtgacccaacaatatgactcttctgacggaaagttgatcatgtaaggttaacagcttttcgaaacaatttctacggttcatagtcaaaactatataaaatttgttcaccgagtaaagtgcaacaactattttaaaatacctttaatttacttttaacataaaaataaatcgtaattaatcaatcaaatctctccaaattaattattaataaaattgtgttaaatttgtaattattatttataataaatttgtttagtttaaatacaattatctctcatgaaaaataaactataaaataaaaaaaattgtagtgaaagtctcatatgacatgatgaaagagtcataaaaaaagaaatagaacatattaaaatctcacatcaattccaaattataaaagagtcatgagaaaaaaatagaatatattaaaatttcacatcaaataaaaattatactcaaataaattatataagtaagaaataataatatatgtgtagaaaattcacatttaaaaaccgacaaagttatgtggagagaagtaaaactctttgcagctttattatcattaaagaagttgaaggtaggttaatactaatatttcatcatctttataaggttttgacttttctgcctcatcgaacttcgaagtcccctccctttttcagtgacagaggtagtcaggtaggcttcttcccccgcttttgggtgacatgttgctcattatcatttcagaccatcaaatccaacattctttggtcatcattgattttttttttctcattttttttcccatcattgctcctaccttactagtaccatcataattttagctaattaatttgtgattacctcaatcaaaacgaatcttattcttcaccacagtgtacccaatttttctcctccaccatatcaaatgcatttaactagtgttattaatgtcatatttatactccttcgccacttctttgccagcttttattattgtgtggtatttgccccccctcttgaaattttaggttttttgatatttattgtttacctttagctattattgtttatgcccactattacttcctcggtatcgttttgcatttatagccatgttgtataaagatacaatggcagtggaaatttaatttacactttaaccaaattgtccttctcagaataattgtatgaatgaattgtctttcacaaatgatattcaatatactaccatttatttggaaatcttggagttttattaccataattccactaatataataacggattcaatagccagtgtgagaagaaagactatatattaaagggaaatgtttttttataaataaaagtaaatcaattttttttctttgtaattttttgaaaaataaaataaaatgcatatatatgaagtacaaagtgaaagaaaagatatttaatattaatatgatgttaattatttaatgtttaaacagttaattaaaagagttgagcccctatccagaagaaatatgtttttcgaatttcaacaaagtttaaactttagacccacagtaataatgcgtggttgaaaatcctttgaaaagatacgtctaagaaaaaattgattcctgaaaaacgattagaaagatcaacaaatttttccccttttacaacattaaaaaattaataaattttcatgtgtctgaatggtgaacccatgcatttttatttttttttaaagaaagactttgaactttgaagcttcaactttcaacagaaccccttttggagtatttccacttcaaaagtaaaccgtactcacaacaatcgaaaaatgataagccaaaatttctttacatttaagtgttctcctatcccagtgggagaaaaaaggtgttctcctatttagattaaaggtaaataaaattttgataccaataattagtaataaataaaattctctgttcgtaacaaaaaaaatatggtgttgtgcattcgttatttccagtcaaatgataaggatatagttataaggtaagaaatcatgctataacatttatttcatttaaaagagtgacaaattgatttattaaaaatttaaaagaaataaataaggtatcatcatgcgggagatttattaaaataatatatttttaaaatcaaattactaaaataatgttgttctaaaacatgcactgttaaattaggtactaatgaaactagtatcccataataagataaatttaaatttaaattttttctaagaggaacatcatatttaatactatgtgatagcatctccaatatgattatctcttgtagcaaaataaaataaaacaaatactattgaacttgggacaaaaacaatttttgcaagctgctacaaattattttgatgtttgtaaatggtcagaaaatcattttaactgctatatatacttctaggggttaaggacaacaaaaatgcatgttttttgcaaaaacacaaatctactttagtaacatatttctatactggtatctagtcaagtcgatgagatatacctgacacacccaaattgaatactccctatgcacccacgccgaataccccctttggccattatgcacatatgtggtacaatatgtcttgatagtaatagatgcgactaacggataccattcaatcatgattatcatccataaacctattaaagggtaattactgaattagaagtacctaaacatgattaggaagtatattacacaattgataatcaaaacgtgtaggcccataggctccaagcccaataagatcagtataaaaaggggtgaaatcctagataaagtcttttatccattctaaaatactcattatatacatttaataactctaagttgaactttcacttaagcattgaaatatcttttacaggtatctttatcatttttccagacaatcaggcacccaagatttaaacaaggaactatggaaagaagatccttcgatacggaagaaaagaaaatcctttgtcgcgataaaaaacccttcaacgacacaatgataggtattccttctatccgatccatatgtgatacaaaaatttcaaaacatcatcatcattattattattattattattattattattattattattattattattattattaacttgtttttaaaagagtactattattttggtaagtctccctctatcatgcattgacaaattgcaagaaccagcaactcgaaattttgtggtgattttacctagcgaaatcaatggaaacaaatttaacgttgcactgttacagaatcagcaaacctatgctcgtgacattccatcttatctaatgcagcgtaatacctttcttactctgcattttttatctttctaaaaaaaattccctttctttttccctttgattaagtttatctttttatactacaaacaaattgtgaattacataaagcaattgtgagaatataaggtgaggacttagggctagctcactaatacgacaaaaaggtagaaccaacatgactagtgaagaacactgatcgaacacaaagtagctgagacattgttcagttcaccaccaagtgcaataaacgatttctataaatagtaattcacctttttcatttgttacgcatttttctgaaatttttaaccaatcataaaaggcagataatgattagtttttttcatatataaaagttttcttttacagtagtataaaatctcaaagacatttatttaaacatactcgagatgtggacaaccagtcccacaggtgtttttataaagtgacgtttttataaagtgatatctcaattttttttcataatcaaaatttcagggacagaagaagactccctagctagtataaggtaggaaaagctgctaagtttaaataagacttgtagagaagtgattatttcaacatgcaatctctaatgtataaaagactttatcttattctatttgaccaatctttttaagattaatagcatattaaaagtgatgttaaatatgtccatgtaataatattttcactacgattattcgaacatacaatctctcatatgtatgacgcgtgattttacgaggaataaatcatctacaacttgcaatttaatgacgtgcgtaataaacgtgaaaataaaacgttaccacaagaaatttttgcatgtctatatttaacataattttagttctactcaagataaaatcaaacacaccataagagatatctcaatttcgaatccctctctacatatccaaccataaaatacactttccaactatcttatacttagaaagaaaggaaaaaaaacatccttttatacacatcaatccatttttacagttatgcttagtcaaacattgcaagaacgctatatgtaacactaaaatgtataataataaaaacctgaagtacatcaggcaaatatgaaataggtgatctttactctttcgattcttattggattgatgggtctaaagtttattgactcaaatgctaaaaaattcaattcaaatacaaaattattatataactcatattaaacttagaaagcatgacacttaattacagtaacagtaacatgattaaaatttaaaaagctcaattgatcaaaccaataccctaatagctcattgggcatccatcatagtctttatgtttttcggtatccatcataatctcggtgctttttccggtagaaacaaaatctttaatacatggtacaaaacgtaacgtttcgcgttatatatgaatccattttttttcccttttcaagtttgggactcacaagatctgtagcgtgaactccaaaacgaaacaaagaattgtagaaggaagaatcgcgtcactgaaaatcgcttacagaaaacacttgttgcaaataacatctttaatattttagaacaccttacatatttagaagcagaattggataacagggaagttccaagtccaactaaacccccaaaactgcagcctagaagtggagccctcatttgtcggtaatgcgagggcaaaccaatccattgtatcacacacaagtcagctatctaccaaacacaaaccaactcatttcacacacccaagtgaagatgataaaccaaaaaaaaaataatgataaaaaagaagaagcatattagctagtacatagacgaatcatcaataaatgtaacataagtcttctcggaatccaaacacttctttattggttttagtttggtagaaccaagagaagggactttccttgagattttcttttcatcctcttatcatataattataataataataataataatagtaataataataatcattttccaaatctatggcctttccattatctctagatgacgttaaaatatagtaacaatgtgatatataataatattccgaaccaaattaaaaaaaaaaaaggaaaaaaagcgagccgagttaacgccaagcagatgcgaccgtgagtgttcttcccatccaaccaaagcaaatccctccgttctcttcttttacagtcagtcccgagttgactcggttgttggccgtggtgagtcgcgattttattgactcggccatgctttgactcagtggttttaactcgaaccccgccatgctcatacgcgcgcgccattttccaaacacttcacaccgttccacgcgatctcttccttcgcacgccaccgagttatgcaattttcgactcagtccctcctcgagtctgactcggtctaggttgttattgttattttctctccctgcagtggtggcctcaatggactccaacaacgcgctgtaatacgacagcgtctccgccacgcgcgccaaaaacggcgccgtgtttgcgtttatctcctgctccacaattgtcaccacgcgcggcgccagacgcttcacgcgccgcaggagctcgtcccgaggattctccgtggagacgctctcgtcgggaatcttgttcaggttgaacgcgaagttcaccatgagaacctcgtccacttcgcatcccagcgactcgcgagtcaactcggtgattttctgagtcgcgacgatcttgaactcgaacctgatcctcagcttctctgcgagtagactcagcatgtctcccacggcgcgcactctctcctcgccgccgttctccgccacagccgcgatcttcaccaccgcgttctggtcacgcgccgagagcgcgttgaggaggtgcaaatactgctttccctttccaatctcaaaatccaccacgcagaacctgttattctccgttttctcctcaaatgcggcttccagaatcgcgtaattcgccgccatgaaccctaccttgaagcacactgagttatccaaaagcagctgagacgactcggcgtgctcctttctgaaaagctccgccaccggcggaggatgctcccccggattcatcctcgatttcaacgccgaaaccatgcaatccgttaacctatcactccggttcacaccgttcaaccggttgaggatctccgctgcaacatcatgttttccttcaacaattgcagatgcggcttccatgagagtttgcttggagcatccggaagcaggcgaagccacggaggaagaagatgacgtggatgacgtcgtcgacgaagtcggcgacgtggtcgtcaaaaccggtttctgaaccggaccgggactgattaaattctgataagtctcggaccactcgctcgtggttatcacagacgcagcatctgcttctccttcttcgtcgttatcttccagaagctgcttctccaattcaagaagcctgtggtccatgatcttcttttccggttcagatgactgaacctgaaccggaacagaaacaggaggagaaacacgaacccggttctggtttggtggaaaacccaaattcgagttccggtagccaaaatttgggcctgtcatgggcacgggcccgttgttggggagattaatgggctgagggcggagctggtgaagtaacggaacaccaaaacgctgcgtttggttggcataaaggttttggctttgcaattcaggaacgggaaagtccatatggttatgggagaaagtggttcggggcttaacggtacgaagcaggaggttggagaggacgtggtttgggttgttgttggtttggttgtaggcttggaattcggttagggtacgtttaccgattagggttggtgtttgccgttgggcgatctgcgaggaaggatctagaaacattgcggggaggttctgttgttgttgttgttgttgttgttgttgggttcggtagagagggtggaggttgttgttggtggcggaggcggcggcgttggggttgttcatgctggtcgccggaatggatctgccgccgaaaccacctaccccggcgaaaaactccgacgcaccaccgccgccagggaaccccgacgaggacattctaggattcggcgaaggaagaaataaggagcaagcaaagaagaagaaaaaacagttaaaaggttgtgtttttgtagaaacgcatcagagaaaaaaaagaaagaaagaaagagagaaagagagagagagagagagagagagagagagagtgttttgttttggttatgcgatgtggtggttcttatggggttgaaatgattcctatgaatataacggggaatggcatggcaaagggttttttttattataattattattataataatagtcctacttttgggggtttaaaatacgagtgtggaatgtttcgcatcagagtctgtacgcattgagatcgggccgttgatttggtttgaattccgagattcagcaagaatggacggttattagagagagggtgtgtgtggtgttgttattataattaataacgaacttgaattgttggcaatccacggcgcgtgagactagcgaacacgctacctatggggcgcgtgtgagaacggataaagtgcggatttggaattgtggcgttattgttgttgttgtgaaacttctaaaaaatcaatgtaaattgaaacatctgataaagcgttagttgtgttttttaagatggagattgcgttaatcaatcactcttttttattttttaattttttatattcgatatttgttttgtagctgaagttgaaaataccaacgccattaaacttgttgaggtatgataattatttacctaaaagatttattgataatgtttcacacaaatctcctaatatacaatatgaatgtctaggcgaaatctcgtagcgatacaaggggatcagacaaaaataaacaacccaagaataaagataatcaataatattcttttttccaaagttgaagaacaaaattcctaacattctaaatgatattatgttagtcatcaaaattgtacatgatcatcgttttaactaaaaatttgaatgagtcagatgagcattaaaccaatataaagaaagcctgacataaaaacatataaaattataaataatttataatattctttaactaaatcttttaaaaaaatattttgaaatacatattaaaatcacaacaatttgtaagtgccgttggatttatacattatttgatttggttttgctttgaaacgtgatattagatattgctttaacatagatgatgtttttaatattgttattgtaaaagttcgtaataacttttaattaatttatgaattgtaaatattgcaaaaataaaataaattatgaatctattgaattaaatcttgtgtaaataaaataatcggtatgaatgcatgtattataaactttatacgtttattacactcgttagtttaagaattttattatttttgttttaattttaaaaataatttaatctttttaattaaaaataaataaatcatctcttttatcattttttatttccaatcatatctctttattattttctattttaaaaaagtcatccgttaacatattattgttgctagctttattgttgttagcattgttattattattatcattataatataaaataagtttgggggttaagaaagagaaaaatattacagatttgattcttcatgccaacaaaaataaataattaacatttttcaatttaaaaaatatcattgttactaccattatcaccatcatcattgttgcatatatatatatatatatatatatatatatatatatatatatatatatatatatatatatatatatcatcattgttgcatatatataagtttgacataatatttacatttctaacataaataatgaattaatatttgttgataaaaaaaatcatcattaatgtagataccaccactattatcatcgattctaccatcatcatcattagaacctttattctcacgtcattattgtctatcatcattattattgtcaacttcatcattactattgtcaccgagggaaggatacaacaataattagagagagaatgaaaatagttgtgacaaaggatattagttttttttaagaaaaaaaataataggtaaatataattgaagtagaagagatgttggtgatgaaattttttttaattgtatcgaacacaacaataatagtgatggtggaggggagataacaataatgaagacggtaataataacaaaagatttaaatgaaaataaaatagaagacaatagaaaaaatgatgaaatgagatttttttaaaattaaaaagatcaaattaaaattaacacaaaaataataaaatttctaaacttatgagtgtaataaaactcatgtgcatgttgcatgcacatgttaactaatcccataatagtaagttaaataatttatctttttcctttgaatgacattaatttactctaaactaaaaaaaacattaatttactcccattgttttttttttattttcctccacttcaatttttctacctttaaatgtttagaattaattttatttgaggtgaacagagttgtctcttgtaaaaaataaaagtggtctcttaataaaaatatataagatgtgaaaaattataggaaaatggaaaaagaaaaaagataataaaaatagttattgttatactaaaataataaattaatattttgattatttaattgaaactattaatgaaaattaacatgagcaaaattacacgtgatagcgaaatccttacattaaaactagtttaattgcccaaatataaaatgcaataatttgttgattttgtaataaaactccaattaaatgtatattaataaaaatagttttataatctaaatggatttttactactttaatagcactttaatatatattcatattcatatatagttatatacaaaaatgtttttttatcaatgctagttatcataatgtttgttttttttttggaacaatcataatgatttttactgtaaccttttacacagatcaattttacaaaagtaagtttatgtgaaatcaacttttcaaactccacctagttcgaaatatggactagaattaacactgtattgatcctatttacttttggcatgttttgtcattttctcacccccaaagtcaactaaattgcctttccgagacaaatttaatgaaagaaaaattccatacctttcacaatacatcgtttgcatccatctttaaccaaataaaatgattatatttagtgaatagattaattaaatttttatttaataaaaatttattatatgggaatttatattataaatttgagtacgaaacttattagaataataggttaaaaagtttattttgataaattaaaaaaatattaaaatatgttaaaactaacttatagaattataaattgttttataagtttaaaaatcaactcctcgtaaacttttaaattcttttagggtgaatttaggatattctctgacgggaagtctatgaataatgcttcaaggtatttagatcgatttgagggattaacttcttttaatgctattaaatattttgatttaagttttttttttctttttaagaggtgaaatagaataatttagttataaaataaatcagttgaagagtaatgatcatatccatagttattacttttacgcaatttgacccgatattttatttttgtccttgttgatccgatttaatattaaaagtatattagttttttttcttccaataatcaaataattttttctgtatattttttataataagcataaattcaaatctcttatcatatacttaagattcaatgttatttcttattcatatcacaccatcttagtataatctctttaactcttagagcaaaagtttaaattaacttccctttaaaaatgaaaaacaaacataactttcttcatgttcatccggtgattttaaaacatatagtaagtaccaacaatacaatcaattactaatcttattttaataacacggtaaaaaaatcttattttgattgcatttattataattaaaaaaacttctaccatttttacttaaaattgaatcaagtaaaaagatataaattattaaccacgtaagtagtagcttgaaaatagttattttacataaaaaatgagaaaaaaattaaccttaaaaacatatattgtgtatttgagcttatgttaataagacttagaactacatccattctatatacggacataaagctacaagaaattgcttccactacacttgagaatatggtaagaaaaaaccacatggatccaaacatgttactttgtggatggattgtcatttgaaagtctctaaatgaaagcttgcatatttcaagacaatcaacagaaaaataactcccttgtatcattgaagctaatgtaagttaacatgatataaatttattaccttcatgattatttagttaaaaaacctattttgtaataagccttctaaataaagcatgtacctaattggttgattatcgaccgattttctattgtgatttaagactttttctattacacactcaaaattaagatattatgtaccttattgattgattgtctctctactgtgacttaaacctcttcatgctacacacttgaggatgaggatttgtgtaccttatcgattgattgtcgaatgttttctgtatcaaatcatccaatcatatgtggatcaagcccttatgcatccatagtaattgatcgacgataggcataattgttacggacactcagaaatctcaagatgtcaatgatggttattgatggagcaattaatctcaaaattatcattgcaaaattaagtggaatgagtaaaaaaagatcaacaatgacttggagaaagcaaattacatttgtctcacttgaatacttatgagttaggtcttgtaaaccctaggtaagacttggttacatgaataaaacataaacttatcactcaataagctatatgtctgactctttgtgttggccaacatgcttaaattttaaaaaaataaacaagactaaataacatgtttggtcctttatgttttaatttttgttcagtttaatcctttatattttaaaagctactgttttattttgtttttaaaatgagttaaaatgatctttttgaaacaagagtatttttttattaattttgggacgtgattttgaacttttttgtttttactaattcaagatgcaaaaattatttcattaaatttacttaaataaaaaaatatataaaccaactaatgtttgaatgaaaaaaatataaactataaagattgaataaaaagctaatccaatcaacaatgaaaaagtgatttttaaaaaaaaaattcatgaaactcagttttttacttaatttaaccatgttcagccctttttttatttgtatattagttgggtttcatgtaaaaaggttattcataaatgtaaaaatcataaaaaaaaatatttcataaaaatataaaaactatttaccaggtcattttttgacttttttttttaatccatgcaactaacccacaagacaaaacaaatcatcttaaattacgcacaaacttctgcagatttaaaaaacataaaacggtatacagttaacgccgtttttcnnnnnnnnnnnnnnnnnnnnnnnnnnnnnnnnnnnnnnnnnnnnnnnnnnnnnnnnnnnnnnnnnnnnnnnnnnnnnnnnnnnnnnnnnnnnnnnnnnnngcaggaccaaataggataaaagcctgaaagagtttagaggcgagtcagtgtccaggagcgcgtgaaggcgcgtgaaagagggtttttatgatgtcttgtactctgggaatgaaatcaatggatctttattcagaagacaagtgatgcagctgacgggacagttactcaagcaactccaaaccccaaatgtattttttctcaacaaatatatcttctccttcatgcttctaatttcttttactcaaatcaatacatattaatcaacacatcattaatttgagtgatgataaattttgtctcttaagtaaattaagttttagatccaaatttttcgaattaataaacatatgtttggaaatggagaactccataaaaagtaaacagtttagttttcgaggaattttaattattgaaaaaaataaatattttatatcaataatatattaaaaaaatattagtagctaaatttagtggaatgttatttgtataagaaattatacaacaaggtgtatgattaaaagagataaagagagaaaatggagaggaatgattatatttgaaacaaaagtaatgtgaaatacattgctaaattaaatttaaaggttaaatagtaaaattggaagtaaaatatgtattcttgatctaccactatgaacgtgtttaattaaaccttctcctaatctccttgaaaactgcaattgaactggttgggtatgcaaaggattcacattcacatcaagaaataaaagaccctccatggagaaaaacttatgatacacattaattaatattataaaacaaaaatttccttatcaaaaatccagaaacacgtgtgtacacgtggcccaatcaaatcgcgcggccagggaagttgggtttggttgcgtgtcgccgtaagatatcccaaactcgtacaccggattccaaattctagcagctggtttggagcgaccgactaaccccggtggattgcagaggttaccgacacgaggcggttgccacaaaggaacctagagattgatgccttcgtaggctatccctggccacaaacatggttcagatctggtgtacgcttgacacatgcccaataaacaaaatgcatgaacgaaagaaaaacccaagaaaaaaaattgcgtattattttctctttctcttgcgtcaaatgcaagaaatttaggattctgttattgtgctgtgacgtaaatgcataaaaaatctgagatgacataaatgctattgtgggagcattataagtgtataaaaaatatatttaagttaatattatatagactgtatgaacatcagaaataaaaataaaataatattgtatgaaagcaataaataatttaaaataataaatgctaaaaaggaagcaaaatgaaaaatatgcatgaagttgttgcaggtatggatgcgagaactataacagttgctaaattgcatcaaatgtatatgatttattacttacattcagtatgtatgaagttggcaatttcaaagcaggggcacaagttggattgtgtttgtccaacaacagtgaattagtgaccgcaaaatgtgatatgtctgcaaattgtagcagactgtagagtactacccactagtgaatcattatttttctagagccttaaataactatttgatccttttaaaataaactgtttttatgttttattttagtcctgtaaaaaataatcctttaaagatataaaatctgaattaaggtgtctaccataattgaaattgcactttcattcatgtcatcacattttcactttaacacgttagtccaaaatatgcttatcatattgatcactatacatttcctcctttttgtttgatgtaaaatttggtatcaaattatcaatactggtggtggtagaacatataagacgtcgacggttcaatttctacagtttgtacacctaagcaggtggcacattgattaaatccccataagtcataagtcatttaactgaaactgaattttattttcttaaataaaatcttagattttagtctcatatataaaaaataattaaaaataaaattattaataaaattaatgaatatacttcacattaatattataatgatacaaaaatattaattattaatcactcaaatttatgaatattaaaccgttgtatttcatttgtatgatgaataatatgaaaaaataatattataataattattttctttaatggtattaatgattctataaatcaaaatgtatggtgattatatacataatcgaattgatgccgttacggtcaacaattgatgaagggattaatttggtttaatagagacattataagaaatcaaaatgaaaattttaaacttaaggaatcaaactacctaaattgtatataagagattaaacttctattttaacctttagtttattttagttttggcttaaatatgttttaatcccttaaatttaggaatctatctttttagtttctcatattaaaatttatttttcttaattcttcaaaattacaaaatgtttttttgtctctcctgcgatcaagattgccacaagttaagaggaactaacaaaatattttataaatttgagggatgtttgtcacatgaatgtttgtaatgtaaaccaaaaataacattattagtggaaaaccaaaattaacattattaacattttattttgatgaaggtccaatttaatcttataaaaacactttaagatattaaaagggaacattttaaacttatgatcaacttaaatcaaaatatttatatggatcaaaaaattatgtttcgactataaaaaatattttaagtaaattacaataatctcttttgaagtttgcattatttacacatgtattttcttcttttaaaatcattactttgacatttctcttgtaactgtgttaaactaatatttggaaattaaaagatatatatattaaattttaattcatttttaggaaatcccgaaattgtccctaagttttaagtgatccaaacagagagagtcctttatctcatgctactatgttaggttgtcttctttgcacaaccaatggtggaatcatgagtctatactccttgttcttggtcctctttgtgctacttgttcaccaacgttgccgcacatttatattctgcattcttattggcctttgtggtggtgcaaagcacaatcatgttagttgtgcgtttgtcctctgcattcacgttggcctctatggtggttctaggcgcgttcaagtttgcttcacttttctcctctgccttttgttctcctctaaggtggtgctaggtgtgtttctccttcacgcttgtggtgctaggtgtgttctcctccgtggtagtgataggaaaacctttctccctcgtctctaaaccattttaatgttcttctccatgctcataatgatgtttcgtttgtgattgtggatgctaggattgtagtcgcttgtttgactgatccttcatcctttgaagccttttgcggtaccattgtcgttgcttgcgaaggtatttgggtacaattaaattttgtccaaacatttgatccatttaattgcttgttttgtgtttcttgccaaatgtattaggttttactataggtttctccctttttataaaaagggtcaaatgtatggagtttctataagggaccagtgtgtgtttggggggggggggggagagagacaaaattaatgattgtgggggattattgatgtttataaactttcctactttgttttgtacttggcttatttgggcttgtacaaaggaaacacgaatatcttggggcattttgtgaagaaacctagtgaaccatgtgtgattcgcaactaggacccaagaaaatttggtatgttctatgcacttgaagatgtctatcactttgtggaccaattgaaactttcaatgggtctcccaatgcgaatggatagtcagataatgaatatgaccctttcaacgatgaagattatgggagtgagacacgtgataatgatgtcttaagtgacttcaagtaaagtattcatattcatatcattggaaatcattatcattttgatgatgagataactgaaatctggcaaaaaagggatatttgaaaaaccacatgagatcccacaaaatgggaggatacacctagaagtcaatcaattgtttatggatgtgaatcattttagttaagttctaaaggatttttctatccaagagggatttccgttaaaaaaaattaaaaatgaaccatctagagtgcgctaacttatgatgtatttggaggatacatgcataactagttgataaaacaaattattttgtgagatctcatgagttagaaggatatatgctccatatcaatttacatcattacaaactacttgataaaacaaattattttccctattttgcaaattgcaccaaccatatggttgtccattgttttaaaagcatactaagtttttatgaaatgttataaagccaaaatatcacaagaaatgaagttcaattgtgattttagaaaactttgaaaccttttttgcaaacataaagttatcatttgaaatagcttgaaaaatagatagtagattttgacaacaaacaacaatatcaaattcaaatccaaaaacaattagcatataatatatagaaatataaaacaattactacaaaatgaatgtcaaacacaagatattaaataaaattttaaatatcagatcagatcataatatttatttgctttcatttgaaattttaaatataaatataatattcttcatgagtgcacataacttttatatttatttacctaaaatcaaaataaataaaaatcataattcatcttataacttaatcatgtgacttaacaaatgtcgaaaaaaaaaacattcaaaaaatatgttgaagaaaaaaacaatgaaaattgggtctaatgaaataatgtactctcaaagttctaaaatatcctccgtgtcctgttttaataaacacttgacgaaaaatatctgtgactcctttaatttaacaatcagttgaaaaatatctacttgtctcttgcctgtgatatcattgtagccttttggttataggcgacaaaagggattttctgctatgggaaatagacgcaagttgaccaacattcataaaattgattcatgctctcttcaatatcttcatttaaccatttatttataactcaccaactttcggcatttcatcaaacttagaaatacaaattacaaaatataagatatgaatgttcccacaaaattatttgtctagtatttgttttaaatattagcaattaagaggataacactaaggatcggagaacaagagaataggtctgaataaaaatctaaaaacttacaacttgctaaagcatgcactactgcacaacttttactttatatgcggtctgatattaaattttacactcaatatatgcttattttttattgaaaatgttaaatgaaaggaaataaggctgactttcaaatatccatattctttttctattgtttttcgttatatgattcttacgaattatctcacagactcagattctgtactctattttattgcaagtaattcttaaattaaattcagaatttatttttaaattcataactttaaatgataccgcaatcaaatgtaaacatcaaaacactacttgaaatattaattttataatttatctccaaatataagaaataaaacatattaatactcgtattagtttttcatgtttttgtatctttagtgatttctttattaaaattaaaattaataaaatcttgtccgtttttaaatatgtctcaagaaatgttaaataatttaattattttatttgtatgatatatttattaactttaatttctttaactaactcatttgacaagtaaataatatattgaaattaaagtgttagcttggtttaaatgtttgttttttgttttcattttctaaaaataattttcatttttaaaatttagaaaatatttctcaagaaaaaaacatcttaagatgtcatcatgttttcacttttttaaaaaatattaaaaacattgattttttttgttcaatttttaaaaatattttcagaattttaaacaagcatatttttactcttattttatgtttttttaaaactaaaaataaagaacactcaaatcaagtgttggttgaattgttcgtataatattaatatttcatcattagcaaaaacaattctggaacaaattttttatatttttgggtcaaacttcaaaatcagtaaatcagttaagatccattttttgaaatatggagagggttaatgaaaaaaaaatatgtttatattgagagtcatatcaaacatcgtatagtttttaattagttgaaaatttcaaaacttttacattgaaagtaactactgtatattatactcattttttcaaagcaatgtatgtacagagatgagggaaccgtagtttgtgtcagttcaccatgcatttagctttaagaccaagtcattgctgccgtatacgtatgcagacacattcttcccctaaaaaatgatggaacatttattaatttagttatactttaataatccgtaatattaattattgacaaaaattcaattcactttctttctatcattaacggcatgaattactggtcttcagtccaatttggttatagtttaataatcgttttttaattgtcaatttcaatacaatttcttttgtatcataaactgcatggattactggtcttcagtccaagtatttgaccatatatatacacttcctcacaccttttccaacttcttaattaccttctagatacattatgcaatacctgaaccacaatttttttttcttaagaagaaaataatattgatgattttttgggggaatgaaataaaagccccgtctatttggaagagttgggtcagtgatgcactatgaaaactattaacagtactatacaatgaacatgatactttctatagattgtagtagtattaattttgtggcatgcatttgaccgaacaaattcgaaaataaattaataagtaaaaccttttagatatttaacttgataaaatatatggttgggaaatatcataactattattataatggcagcccaatgaattgaaagatccacatgtagattgcgtgtaccgtgtaaaaaaaattagctgtcaacttaaccatccaaacggccccttaccctcttatttaatttagggttatcttgtgtacttttttttataaaaaaaaaagtaattatactgtgcacgcactgacacacacttgcccataatcttatacttatatagttttatcgtttgattataattaactttgctttatcttttatttatttatactctaatttcatcaattcacacaaacatgaagtgatcgatctggcttgtgctaatatatatatattaaactagatacttagattaaccctaattgttaagtttattttaaaaatatcttattttgcattatttagggcctaacgcgtataactttaattatacaagaaattagcattcttttttattttgatcataatttagtgttgcagctaatatgctagaaaaattagtcgttacaagaatgctcctaattaaccaaaactcgtgccaaaagaaatgtctcttgctatctaccccattttttttcttcttttgaataaattcttctcgtgttttaaatttattttacattgagtcttggcgtgggaatcagccacgtggcagatgcagaagtgatgtgccacttgtaccttggcctaaccaactcaaccacctccattcattattcttttgccaaattatcgtattatcaatatagttcttctcatgctttaccgaaatatacatcaaattccaaatttacctaaacacctttttgcattggtatacagccctaagaaaacccccatgacagggacccacaacactgcctggggatacccatgcccaactttaaattatacttcattagtatatttctcgtacgttcataattaagtatggtctttccaaattattaagaataagatgtacattatataataatacccaataacttatttattaactgtatgtgtatatatcaagtttgaacataataaatgttcccacctcaagtctgagttcacatcattaaaattaccatatctaatgtatttgcctacttagatattcggttggctaatatttttctttcataacttacaagctccctaaaaaattatatgcaacacgtttatctctaataaaaaggcagtcccattaaattttgttttcttaaatctaaagagttcattaaattttgtataactgaaagtgctttggttatagacgaattctacggtgaaaaagttaaatttttccccaccatgggaaagttaattttagaccgttagatatatttaagttttatctgatggttaacatttttttttcttttttctgtttctctttttcttcatgactttcccgaattacccttttctttttcccttaccctgtctttcttcttcgctttagaccaccatcactaccaccgtttccactcaccaacacataacaccagagcaattagggtttgtagattccgttgttcccaccacagatctcacattcatagtttcaattagcgtttgaatctcgcaattaactccatctctgcgttagccaccacactcacactttcctccccaataaccaacccccacaaagttaaaccctttttctttttctcgaaacaaacgcggcctagaagcagaagaaacctttccctaacccctccaatcgttcctagaaaccgaaaataacgaaactgaagaagagtttaacaaagggaactcgatcactgttttggtgttgatttgctttgttttgggttgactgttggtttattaatgtgattgagggccctcaccatctccgccgtaagaaaacggatttttgacctgcgaaagagattaggtcgaatctcctcgttctggcaacgaaacagagcaaggaacgatgcatcttgcttgtccatagaaggaaaagaaaacctctcaatcatgcatattaatgtggtatttttttttttattatgatgttgatataaaatatttatttgtttgattgatattttttttttcaaaaatctgactgctctactttatttgaaaacttaaaaagttagaaagttgagaagttaattgctaaaaattattaagtttatttattaagctattaatatttaataaaattttaacttaaataattaaaaaaatataaaataacattagacatatttttatataaatttcaattttatttgattaaaatgtattttgagctgttataattttatattcaattgttacaatttttcaattctactcttaatcttatactataacttaaaaaatattttaaatcaaattaaaataaaataaaaacacttaagtaaacattatagttttattatgtaattagcatagtagttaaaataaattatttaatataaaattattaaaagaaaataataaaaataaatataagatttatgattatcaattttgcaaaatataatgctaaaataataaattaaatattataaatgacatattgattaaaaaatagtgtaatataagaaaatggagaatataataataaaaacaaaataaaataaacttatcattatattacatcaacattgattgatataagtgataatgatttatattttttaattaaagggatcttgatattgtatatgaaataaaacatgtggataaaatatttattcaacgatttttacttacaacaacgagcaaaatatattaatgtacaatgcttaaaataatacaatagttaaattaaacaatttgatgaataataagaatatattttattggaaaaaggacaatttttaataaatatttgaaagatacaaaaataaaatataaaaaacttaaaactaaaagttagtaattcaaaaagttacatgaaattacattttgaaaaacttaggaattattaattttatttttatctctaaacaatcaaaacactttaaaaaaactgtaaagaaaactacttgaaattgaaatagtattttaaaacactaaaaattactatgagaataaagaagcatcgttttagcagggttgattatattatccaggaagagccgtcaatcaggctagcaattcgtgtgttgatagcgttatcgcctaacagaaaacagctcactctgagttagaaggacagtacggtcatttcccttcgtgggccccatgtttggtggcaaccggggtttatcggttctcactgcggatcactctaggcgccgacaccgagattcccgacgcgctcttcatcggtgagtgcattacacgcgctgacggcaccacacgtaaccgacgctcttcctcaaaacggcacgacggcatgtgattgtgattgtcagggtcagcaacatcaacggctcgtgtttctcgactatccaatcatcactttactcttttctttttttatattataatgcaaaataggaagaaaaatatgttagtacattacctacgtccaactagtgcttttcaaaatgcttgtgcatgactggtgtcaaatatctggttctggtttaataattgtgtttgaaaatattggtttttgaagaaatatttataataagaaaaaaagactatgcattagtttatattattacataattataatttgttatatataataaatttattaatttttataaagattattttaaaatttatatcaacaataacatatgataaaattattttatagcattaatgcatgatcattaaattttttaaaaattagctagtataaataaataaatatcttttaatataatctaaatcaagtaggtattgactttttaattcatgtccaagtttttatcctttaattttttatcaacattttctcaaacatgtaaaataatggattattattattattttaatttttagttttcatgtaatattttttgtttcagttataaattatatggcactccttggatttttctaaaaaatatatattttcgcggggctgatttcttgactgtaacattgggtgggaatggacttacgtggaagttagagtaaggaggtgggatattgacctaaaaaaggtgtacactaccaagcatgcaacaaaagttcaaaggggttggagttagaaaaaggatgagtgctaaaacactctttaattattaattacaatataaaattacagttctacgtgtaatgaccaggattatgcagttcttttcaatctctttttcaatttataataaaaaaataataacctattgcataaagattggatgagataacataatttcattccatacaatgatatgtagaaagtaactagtgcctatacatggtcctttacgaatacgaattaaaatgaagtttttgattgaaattatattaattatcatacttgacgtttatagtttagaaatgatccggatttggacttctacatgtgttgtaataattttaatttctgtagtagttatattaatttaatgagtacttgtttaaaatgttatattttttcataaatctttttaatactcattcatgaaaagcaaactaaataaaaaataaatatattcacacttgagaatacttgttgaagagtactaaaatatttttttactttgaccagtaatacttattttttttttcaaggggtaataaaaagtcaattatagactagtataaacaatatatgtgtagattatttttgtagaaatcatgtatacatctcttattgaaaacaaatctcactggtcagataaaattagtatgatggataaaattctccatctaaatttttaatatgattagtttcatacctagaattcaaatttgaaactaatgataaagatgaaacaaccttacactatttgatatacttgatatacaaacttggtgatatatgagttagtttaagaacatgagtttgatattgtgtaagaaaatatatcgtcaggagtaatttttatctttaatacatgattatggaaaaatataatgaaatatgactaaatcaaatgaaatttggaaccattttaattataaatttattttaaaatgaaattggaagttgggtcctttaaaagcaacttggccgtaaaacacgccccagaaaatacatttccaaaaagcctaatttgattccttaagttatatacaatgatagagctagacataggttggtgaaaatttagacctaacttaacccaaacttaagagattaaaacaatattgactggcaactcaataaaataaaataaaaactcgacggcatagttgatgcttctagaagtttttgcaagaaattgaaaatattaattatactttaatttagttttgaatcatattatacgaaataatatttactcattgctcggcacaaaataatatcttgtcatgttattataaattattttaattgaacagtccaaattccagacacactttaacatgtatacgtacatttatacaagaaggaagcactatccttgatttttattgttaataattgaagtgtctcttggataaagctatctttagcaaatgttatttaactagtaaagcaaaatcactaataaaagaaaggttgtttattagaagagtcttccaaattccaattatgtagccaagagcaaatgaagaaagcttctgactaaagaaaataactgttaggagaaaattgtttcgaaaatttgaaaagaagtggagcttgaaagtttcttggttttgttgatgttgaaaagctcatttgactctgtgaagaagagaaaagttagtgggatttgagaagattcttgcatatccttgtttggccttatgcatggtgtaaaggccacgcttcagatttgtagtataatttcacaagctaccatattgacaagtaattgaataaataaatatctgtcaagcaatgttaaatatccattagtcattattgtcgactcatgctagttttttattatctaaaaatcttttaatagctagtataagataaagtgcaatcccaccaacgaacgaacttactttttggtagaccacacaattagcccaacaaattgtattttcaaccctaaactaggagctcactatttagaccctctattcttctaagtacacccattgccccatttttataccaaatatatccttttaaacccttattttacactcccgtgtttgttttaatttaaaatcttatttccattatattttaattgttatttaaaccctaattttgaaacttattttccccctcatattcattatataatactgtgttttccatcaaatataatattgtgtttttcttcacgtggtacaatgcttcaagtaatgtttatcacaaacttcatatggaatgtgaattaaacatcatttgttataaaataaaaacaatagaaactaatagaataagaaaacatattgtaattgcagagcaaagcttttgatggtggtttaatttcttaaattattttgtccatcaataattttgaatatgcattttcaacccatcaactttaggtctccattgttcaaataagtgtgtgcatcgacaattggtgtgacttgttaaggtacgctcaaataatttgaattcaatttttgtttatgtctatcataaatgacttttcagaacaatatataccaattttgaaaagtaattttctaaactgtgttgtaattccaaaaattactttcacaaattgatatatattgtccaaaaagttatttttggttgtcttattttgttttatctcgacacaactttatttcttttcaaattttattttcatttatatgcaaacatgaaatattgtgttagtaagatgtctagagagataaatataccaattgagagagtggggggggaataagattgttgattacattgggcaagaaaatctacaacttagccttaggccaaaattttaaatgtgaaaccaatgatctagccttaactaatagggttgtgaaggttcattgggcttgtggacttttttaatgttaggcttttgactttgggaacaattattcctattaccaaatttgctattggccctactaacttttttgaaattcttcttttgcccactcaccaaatccatacacccattcctttctcctcagattcaaaattgtctcccccaccctagcatcccagatccataacccccatgttgctctctccctcgtgaaacccctcccctcgtgccacccctctccctcatattccattgctttatttttttcaccccatgtgtgcatcggaaatacaattatgttatagacttgttcaacaaaatcgtatttcctttggaaggatatttttggaaaaaatatttaaaagttcatgtgggtagtgccaataaaaaaagttgatagtcacaatagcatgcccctttgactttataggccttttacttgaacccatgtggaatatgagtgagcaagtggggtggagtgactcattttaatagctctattcatatcaataaggctaaaactttatgcacctccaaaaatttcttctaacaccccattacattctagaatatgatgggtgtgcaagaagcaacaatctatcaacaaatgtgtgcaaattcacacgaattgcaacttgcaaagagtgtcgaatacattcatacactgaatcaaataaatataaactagagaaaatagggaccgtaagatccaatgatttgctcgtagatgagtattgcacgttatatcttcacacttcgttttttttatccatataaagctcaagtacaacctttagggaaatatcaaattgcaccttaattattataatagtatattgttacattgagtgggcgatgaatctttcacattttatgttattgttatacattcaaggatatcgatcctagaattagattttatgtaaattgtctaatgtattcaagagaaaaaatatcgatacatgctgacttaattttgtaaaatatgtaattatgataagcatcacatgttaatcacgaggtccttaatttagtgagctacttctgagatattttaattgacacaattcacatagtaagtgtaatgtatccctcctagcctctcttctccttctcttcgatctctttagtgattatcaaattgtgcaactagcttgagcatttttatcttaattcttaaatcacgagtagtagctagtcatggaatatattcactttttacgtatcacaagatagaatttggggggaatccctttatattcttgtttgcaagctattgtccattggtatgcattggactatgctccagtacaaatatcttgtttcctatataatatttatagaatttaattggcataagcgcattaataaaaaaaaaagtattgaagaggttgcgcaccttttctgattcttatctcccttactccctttcaaatccttttctatgtatgttttcatagcttaatatttcaatattttagaatttagaatgtataatgtaaattatatgaaatctagggtgcatgtttttcaaagactcttttaagactcattatcaagaaggctgagaataaggtgcaaatctgtagaacatgatttggttctaaaactcacattgactgagacatgggagatagttattacattaccttaagtctcccatttaaagtcttctaattaaaaaaatataactaggagaagataccaaactaaagatattttcttaagttttgtgataaaaattaattataatagatattttgtatgtgtcatgataactaaaaaataattattagtttgttgactgtttggataataattatctttaaaatcgtattaaatataaattttacttattaaaagtataaagaacttttatattaaaaataaataattattaaactctaaatttttaaaaacatacatgataagtaggaattgttggcacaaaaaatatttgcccacaactggtttaggcattgatgagtatttgagcaagtctaaacacacactgaaacaaaggagagatccattaacgtgaaatgcaaagaccttggggaacatgagattttttttctttattttaaaaatttagttcaaatgaaattttagaaaatcataaaaaataaaaggagtaatggacaagaaaaataataaaatgagcatttttttaggaattaaaaagtaaataaagaagaatttcagcataaaaaatataaaaaattctctctccaaagtttgtcatccaaacacactcctagctactcaattttggagaaacttttccttttctgttttgaagacattctgattgttaactccctccagaatctcatctccaaacacaacttctgaatcgatcaacgagtttttaataggctaggcagcatcatttgcaacttgtggtggtgttgatcacttatgtctatataacagctttgcccttcggtaagaaagagataatagagtggaataggtgggtatggtgaagcaaaggatgtaggtttaataacaggtactaagtcttggtggtcatcttcaactacatgagtaggcaacaatttggtattaggcatatggtgggtcttgattcatacagcaaggaacaggaaattatacaaaattccgttgataattgttgatagtactcatttggagaatgattatagagatttaagttaaaaaaatctataaaataaatactaaaagccttttgcttcattttttaaggtattttctttaacattaattttaaactaactttaaagataaaaaagtttcaagtaaaattttaccttacattgaaaattgtagtgatgtacgtgtaaaattaaatattgttgggatatttttgtgtgggagattccaatattcttcacttttaggtagacgttccccgtcaagagaatctaggcctgcctttgtgtttattgtttatagattgctaagtgggtcattacacagtgcaaaagaaaaggaaggattactatatcaaaacgaaagggatcgttaaagtggacatcctaccttaactttgatataattttttttttggtaatgatcgatatataatatttttagtggaaagaacatgtatatcctttagataagtacttagaagtattatgtatcataaaattcactatatttaatacatgcaattgcatttttagaattcaaactctaaattattcttaaaataactccacatcaattgatgaaccattttatattattgtctctccgactctactctcatttaagtttaaaacttgccctacttcaaaaggaaatgagtgaaaaacagcaagtacttgtacagatgttttgaaccaacagctagaattctaaaatctaactcatatttttttacactctttatcataaaaccaataagtaattaatgaataaactagactgagctcacggccggttctgtttgttcaccaagtggacttatcctctttctcacttaagagttccctcaacaaagaaacccatcaactgcaaatctgaaatttgaactcttactcaacgtttgatccctttggaacaggcttaattacattcatctttgctaaattgttggtaacattgaaaaagatgtgaaatgtacaactcaagggaataagcactatttgtccatctcatccatctatttatttattataaaatctaacagttcttaccattttcaccaccataaaccatatatattatcaagtggactagcgcaatcgtggtccctgatgttgcctttccaaacatttgtggacaaaattgtaaagacttcactaaacctaaaactttacagctgtgaatcttaaagatatgtaccttttgtacaaagcttaaacctcatacaagggcatatagagttatagactatcaccatgtaattatatgtatgattggaagttcaaaacataaatttcagtctaagaaactgaatattaggggaagaagaactcctcaaatggagacacatcattagttatatttcggtacttgattttaaatttttgttaatgacgttctatattctaatccccccacatatatcaggtaaatttgcatatgtatactttggttagataatattgatatcaattcacacgtgacaacataatgtaatgataattaaaagttattgacacaaataatttgatacttaactcttttaattaagatttgaagtttgatctttgacttgatcatgaagtcacaactaaaagtataattgatcttaaagtgaattgacatagtaaaatgaagatgagttggttttcaaaataagatgttctaaatatttcctggtttgactaaaaaaaacataatgcagttataaaaggaattgtgagacagtttgttaaatagtaatttttttgatttaatcccatttttaatttattaagttttacacttgtttcgttttgatatatttattgtaagacattcaattttagttttttatttttatattttcaaacgttttattttaatttttttttatgtttttcatcaataacattattactccattaactttaaaattttaaaatatatttttaaaaatagtaacagctaaaaactattattataaataataatattctaacccataattgtctagtagatttaaactttgttgccaccactataacaatcttatttataaaagttattttctagaactaatatattaattttgttgatttctatttatttattagtgtttcctttatctatgatcttaagattcatagttctaaaacatgattagccaccaatctcatgcactagggaaacactttattgtacgaattattccatcaacatgccaaattcaaattgcagaaccaacaaactcattcacagatttacaaacattttattacagagaagagtttaagtttttcctctccccctacaacgacattgagcatgccgttgttcatctcaaaggttatttttgtagtttattattaaaacacacgtagtagtgcttattagttgtcactattttaaactaagtatttcaaaattttaaaattaatggagcagtaacattattgacgtaaaatacaaaaaacaatcaacgtgagtgactgtgtaaatgaaaacggatgtactgagtcatggtgacatattggtagttgttttaataaataataaataataaggaaaggacaaagttaacacagaagaagggtgactcatcattgatgttccttccatttagtccattcttcttcctaaaacgtaagtgactgtgttgcattccatctactaactgtagcagctaaaatcttctgtcacagtcgcacatcaaaggcaaagccttcgtgcttactcatttgcgtcaaagctttacatgatctgtttaagattttggcttttatgatttgaaagttattatttttatttgattgacaaaagttaattgttaatttgttagtttttgttagcaatctctctcacccttctgcattcaacaaccaagccatccttatgactccttgttgtatgattggaagtttataacaaacttcagttagaaagaaactgagtgttgagggaagaaaaagaactcctcaaatggaaaccccattagtgatccaaaagcatacttcagaacccgactatttgccggtggaaagcttgaaggatgttatgtttgttttgcgaacggagacagtgaagatatggagagtagcactcccaatggctctgcttgcactgtttcagcttctcatggactcctcaacttccatctatgctggtcatattggagacattgaactctcttctatcggtgtttaccaaggtgtcatcggtgccatctatttttacttgctggttagcacatttttacctcttctattcttcataaacttaatatttttcttatcatttgatttctaaacaccgaaaaatgaagttgttgttaagagtagtagtattaactcgttagaaataagctctataaatagagtacttgctcactgtcattgtatcttttatcaaaatcagtcaattacactatgagttacttatatggtatggtactcttctcttgttctttgagatctacggtctctggcctcaccaattgtgtgttacttgcatatctcctcagttttcttataggtaaccaaatccattaatgagtaatttatctgtctttgtgcccatatgacaactaacactggcaagtaattccatctcttgtaaacttttgtaagtatctgaagttgtaataatgatgaagaaagttcccaacattcttctttgaatgccacttttttttgctagtgtactgtatggtatgctttttgaggaaaactatgatggacatgatgaaagtggtgattggaagaaggatttatgagcagcagtggaggatttattgtctttcacaaaaaaagaacagtattaaagattcgggagaacaggtttttatagattctaactcaaaagaagtaaatgtaagggaagatgaacatcttgagcctatgagatgagaaatttggactggacggaaattgagagtttaagttgcagacaaaatgggtcaaggttgattccgacatttgcacaagcagtagataggcaattcgtgaattgaagaggataaggattaattggtaagggccttgagccagttcacataccagtcacccagaacagtttagaagcatgcacttgctaattgttattagttgtcattagttttttggggaggaaatggcagagttcaacattccattgtagtgcaggcctgcaggggtaaaaggaagcatagtactttgtggtggttttcatgatatattgagatggaagagccatttttggaaaattatgtggtaccaggggtagctttcaggccaatactgtgtatgtctggttaacttgacgagtagatatgctttgcataaagcagctacttaacctgctgtattctttttgtgaggccttagttagacacatcttgtgtttaagttaggctttaataaatttttttggcttataaaaagaaagaacaaaaactagcaagtaaatgtgtgttttgattttatttattttctcatatgtggaaaatttggtgttttagtccttgtataattgaacaattattattgtatcattgctattttgtcatatgtgactttttgatttttttttattatcttatctatgattcatgtgcaaaattacagtttggtatgtcatctgcactggcaacactttgtggccaagcttttggagcaggaaaaattcaatctacttgtatttatgttcaaagatcatggattatacttactgccacttgtataatcctcttgcctatttatgtatatgccactccaatcttaaagttgcttggccaagatgaaggaatagctgaagttgctggaagatattctatacaagtaattccctacatgttttcttttgctgtagcttttcccatccagagatttcttcaggcccagagcaaggttaaagtaattatgtgcatagcatttgtggatttgcttatacaaaatgggttgctttacatattcataaatgtatttggttggggtataaccggcttggcaatagtgactaatatcgtagggtggttatatgctgtggctttggttgtgtataccattggttggtgcaaagaagaatggagtggattttgttggatggcatttagggatttgtgggcctttgctaagttaagccttgcatcatctgtaatgaattgcttagagcaatggtatattacatgcattatgctacttgctggtctactagacaatcctgtgattgctgttggttcctattctatttggtaagatgaactaatctgcagctgtttagattggttataatacaaactttttccatgatttttattttctactgattgattcagtaaaactctttacatttcttggtattcctcatagatttacttttgtattttaagcttcaatgttcagggttgggacgacatgctacgccttggaataaatacagccataaggtgagtgactataaaataaacacatgataacatcagttttgggtaaatgacatcctacttaatttatcatgggactacaattctggtgaaatattatgtcaatatatggactgttatcaattacaaaggaaactaaatgtaagaggttgattatatatttttggttaatatgcttagtagttccaacaaatatggtgaattttaatttttttcattgcactcctttgttagttttgatgccaataagttttaaaaatagttcattgggccatatgacgtgcatctagacatgcaacctccacatgccatttaagattaatcactgacatgccatgtcaagatacatgttacgccatcaaaaaagataatagtgatcaatttaaatttataagaatcaaaactaataacagttttcataaactaaaaccaaaatttccatatttatcggaactaagacatagacatctatttttcatgtatttgtttcattcttacactgactattggttcaataccctccaagtgttcgtgtctccaatacgcttggcatgtcgcatccaagagcagccatatactctttctgtgtgacaatgttccagtctctcctccttggtattcttttcatgaccgtaattttctttagtaaagatgagtttgccaaaatctttaccgacagtgaggatatgatactagctgctgctgatttagcataccttcttggtgtaacaattgttctcaatagtgcttcacaggtgatgtcaggtaattgttttctttggcaacttgaaacattctttttgtaacattttctccagctcatgagtgttctgatattgtacccctaattctagttttttttttttttttttaacatctccataggtgtggccattggaagtggatggcaagttatggttggttatataaacctagcatgttattacattgttggactccctattggaattttccttggtttcaagctgcatttaggggtcaaggtaacaatgttactgttattggaaatgtatctttacttcaatgtcaaatgctgcctatttttgtgtttgtatctttgatcgatctccaacttatcaattatgagttttctttccttcaaatttatacttaaatggttttatggtttagggtctctggggaggcacaatgtgcggcagtattcttcagactttagtcctctttacaattatttggaagaccaactggtccaaggaggtaagctataggattttttcaataagcagctgtttttttggcactaattccaattttttgcagtgattttctgtatgttaattatccaacagcaatgttcgatttgtatatatactaattatcctaccaagttaagctattaataagtttttttttttacatgcatcatggcttaaaaaacaaaaaacaaaaaacaaaaaacaaaaaggaagcaacatgcgattttggctagaacttttatataagcaagaaagggaagacaggacaaatctatcggttgctcttgtgaagccattgaaatgttgtttgtttgtttgttttctatatattttaaaatatttttttggtttaaacctgtctaatttgcaatttaatactcataattataactcactcgagtgttgcaatatgcaacagtgtttgccactagcattagccagctttattttttcaatgtctagtatcttacggggaatgtatgactgcaggtggaacaaacagctcatcgcatgcgattatatgtggagcaataacgggactagtcctgtgtgaaatacaaatttgggttcttttttatatttaagtaatatatactgtctcaagctcataagtgttcttcgcataccattaattttctctctctatatatgaatgtcagacacaagagaacgttattttactcaataagccaaatgtagaagtaaaactaagtagaagtaaaaacgcagacattgtacgttattggatgtgatccatgataacgacggtcgaattgtttcaaaataaataaaactaaaattctagagtaaaggattaacttaggtcgtctcagagatacaattcattttgatttctactttaattcacttataaacagcagaagaaattttagcgaatagtttatagtcaaatgtaaaggaatgcaaaaatacaaaaacaaagatgtagaaacaaaacataacaagaataaaatatgaatcaagtttaatagcatcaacctaattcaccaaatcaatgcaaattgaattatcacaattattacgaatgatgttcagagtgtgaaagttcagtcaaatgcattagagactgttcaatagaattaatccctaaattgtttgatatcgcaaattaggttagaaaatcatcaaaacaatttgtgattaaatttcaaaatttggaaataaattgataacctaatcagttttcaatcctaagcataatcataatcatgaaaataaaaaataggattgaagaaaacaatgaacattcacaaagattagaaataccaaaccagaactcaaattcactcttgcttgcaatggatccttggattgattaagtgtttagcctttcatgatcatcaccaatggaaaattcacgaaatttgtacaagagaaaggaaaaacaaaagcgaaaagaggaagaagaacgaagaacagttgagagaaaaagagagaaaagagtttggtcctaaagcttgtacagtaattaaatctgtttttttataaataaaagtaactaactaactaacttccactaatatatcgagtgactatgcagaaggaagggatgagcctgaattaagcccatctaatatacttaattaaactaattacacaaaacaaaacttaaactcacagttcaattattcaagtgcagaggttatgacttccaaacccaatttgaccctcgaaaataacataattgatctaagcttgtttttgacaaaattaaagatcttttaaggactactcatacactccactccatttggagctctgtagtgtcctaaaggccttgcacaagatagataggtcgagtaaacacaaaaatccaaaaataagccacaaatattaattaagcttaataatttgcctaagatcaaaactaagttaaagtgagaaaataaaggtcaaatagatgccaattgagttaagaaaaatagaaaaataataaactacaaatgctcaatcagatctcctatgaagacccacacatgaaggggaagtgcggacgagacatcgtagaatgactgtgttggtgcacgcacgccttgatgacgagtgacgagagtaacaacaactaaagccagagccacaaccagttgttgataggatcattggacttccatttggaggaggtctagttgatttgtcctttattcgatcttataaggagtactatgttggtcatgtatggatggatatgtgtggccaaagctgaagtttgtcagccacggtgcccaggtgctagtactccctattcattggtaagttttttttatttgtaagtttaagctccatacacttgtgttaaacaacacaactatcacttacgtaaacaagttgatgataaaaaaaataaagtagaatttgcaacgtgatgatgtccatagttgttttccttaaagcatcaagcgatatgtcataatcatttattctgattaatacacacttcatgttttaagcaatatattgaatatcaagaagcaaaggtattgagttgcattagatccttattgctatttatagtagatgatatactcttctctcgtgagccatatcacacatacaatacaaatacaaattatatagactgtgtctacacattatacgattgatgtgtattaaaaaaatagtatttagtcaacatgtaagaaaaagtagtttttagtcataaatacaatgttgtagtgtttaattaatgaaaaacaccaaatgtatttttatttttatttttaatttttttttaaaatagtacaatgaaatctagattccatcatcatgattttgttgtgttgaagggtaaggggtgcaaagatgattatagtgaaatcacgactttgttatgcatcttattcaacacaatcatgattttgtggcaagggtaggttgggaataaaaaaagggccaaaagggcccgtttcttggttgggaccgatagcaaatggaatgggactaacaacaactcccaccaaataatacgtgctttctcacgactcaagatctagactgggacaatctttctattcttatccccatagttactattctcaccatccatgtgggtttttattttttttttaattttcaaaatgccctttttgtgaaaacatgattttgttgtgcaacacatacaacaaaatcttgttttgcctattaaatcctcccccaatgcataacaaaaaaatatttttgttatgttatatacaacaaaatcatattttcgttgtgcataacacaatgaaatcatgtttctgttgtacataacacaacaaaatcatgatttcattgtgcattttgattttttttttgctttttaaaaggtttttgttcagaaaatgaatatgaactgttgatattgtaattattgagtgacacaaaatttttgactaacacatgaaaaattaatgcatataaatcgatttaatgtgaatcattgatattttaaggtgaatttggaccgttgcttattattttacacaataatcataataatgatgatttgacaagcaaacaataattttgtaaagcttcatacatcttgttaagatacaaaagaaaaatacacttctgttgtgtgtttttatatacacaatcgaaatgtgattccattgtgcattgatacacaacaatattacatttccgttaaccacctccttcaaacttgagcaaaatgagaagggagaagagaaggagacacacaaaagcagagtgggaggagcaaagagagaaggaaatgagaagtgagaagagacgggaagtaggaagagaagagagtgagcgtgggtgtgggaatagaagagtgaaatcgagaaggagaagaagcaggtggggtgtgggaagagagaaggggaaggggtgtggcgtagaactgcctcagggatatttttgtcctttaaccaatatttcaaaaagtataaggtgcaaatagcaatttgggtgtgagaatagtaaccccctctcatacactttttacacaacccaacaacatctttttttagggctttaacacacctacccttgcccaagaagttgtaattaattatcaaagatgaaaatagttgatagtatagttatttaagtatagttcaaatcttagtggcttgtttttgatatcttaacatgtgtatctaatgcatatccattgtgaattaacatacttcagtacattgcatctgacggaaaaagtttaaaatcacctctcaccttagctcgtgtgcagatagtgcaaatcttccactgctactaaaacttttgtgaacaaaactgtattagattatccactttattactctaaaattttcccctattttacactctgcttatgagaaaaaaccattacaaaacccaaaaacactttaatcacaaaaatgaacctagtaagaatttaataaattttcctatatatgcgaattttattgaaattgctaaacagtggagcaccgatatattcactaaccagattgatggaatggatacaaaatgcatgtcaatcaatgttaagaaaaagcatcacgagaacttcacgttctccccactctcatacaatatgaaagtcattgtaaccacaaatttggacttgaatctgaaataaacacatttattttatgaataacctgatatgagatcaatgtagtcaacatcaatttttgcatgaaccattgtaacaaactgaacagtcaaacaacaaaggtaactagtgaaataacagaataaacctcgtctgaacaatgcacaataaaggcttgccaaagtttaccccaaatacaaggttctcatcacaataacatagtcccataactgaactgcctttggtgaactaaaaggaagacctacaatagcacacggcagcacataagaactcttcacaaaaaacattgacagagcctaattataacactcacctattttacacctgtgatacttaacagatgtataaaatgatttattgcagagccgtcatagaatatttcatgtttcagtgccccacttggaagtttataacaaatttcagtctcaaactgagtgttaaggaaagaactcctcaaatggagacaccattagtgatccaaatgtatacttcagtaccggactattcccaatggaactgtttgcattgttccaggttctcatggactcctcaacttccatctatgctggtcatattggagacattgaactctcttctattgctgtttaccaaggtgtcatcaattccatctatttttacttgctggttagcacattgatcattaacttggttttcttttcatttgacttctataacagaaaattgaatctaccaaatccattaatgagtaaattagctgactttatgcccaaatgacaaccaacactagcaagtaaatgtgtgttttgattttatttattttctcgtatgtggaaaatatggtgttttagtccattgacaacactttgtggccaagcttatggagcagggcaaattcaatcagcttgtatttaagttcaaaagtcatggattatacttactgctacttgtataatcctcttgcctatttatgtatatgccactccaatcttaaagttgcttggccaagaccaaggtttcaaatattggtcgtggtggcattgcggtgttttctttgagccacatatttgatcttgctggcagatattttatacaagtaattccctacgtgttttcttttgctgtagcttttcgcattcagagatttcttcaagcacaaagcaaggttaaagttattatgtgcatagcatttgtggatttgcttatacaaaatgggctgctttacatcttcataaatgtatttggttggggtataaccggcttggcaatggttactaatatcatagggtcgttgtgtgctttggctttggttgtctataccattggttggtgcagagaagaatggaggggattttcacaactccaaaaaaggtttttggcggcaattattttgccttttagagtccatgtaaatagccactaaaccttttatcggcaaaaggcctggcatattcaaggtcggtgtttatatggacgagtgcttgtaatggccatttgaatggccccaaaaaactaacttttggtagcaattattatggccagaaaaagtaatttttccaactatctctatcacccatttgctgattttatttattgctgttaaaagatgctaagattacaattatgtgatactaggatggagtaaaatagcacataaaaaatcagcttaaattgaatcaaacagagatgttgctaactctaattcatttttgtccaaaaacaataagctgtcactgcaagaactactctaaagagtagtgtgtgagaatgaagtgaggaaacaagcacaaatgagatgataatgagtggaatgaaattattaagatttaagagggttatgagctcctgaatccatggtaattggttaagaggttgagactaattagtattttttaaaaaggtatttttaccggcatttagctattagccataaatagtattaattagatgataaaatactggcaattagtgtatcaccattaaacaattgtcgctaaaaatctaatttggagtagtgtttcttggattgcatttaggaatttgtgggcctttgctaagttaagccttgcatcatctgtaatgaattgcttagaacaatggtatattacatgcattatgctccttgatggtctactggacaagcctgtgtgattgctgttggttcctattctgtttggtaagatgaactaaattgcagctgtttattagattggttatattacacactttttttcaggattttcattttccattgaatgattcaataagactctttacatttcttggtattcctcatatatttatttttatatttttagcttcaatgttcagggttgggactacatgctgctccttggaataaatacagccataaggtgagtgactataaaataaacacatgacaacatcagattttttttttggctaaagtacgtttttggttcttgataaattaaattttattttagatttctaataattttttctttgcattgagttattaaaaaataataatttcatttttttatctttaatattttcttttaatcctgataaattagcaaattttattttgggtccctaagaaattttgttcattgttactaatcccttttcaaatgaagacaccattagtgatccaaacacatacttaaaaacctgactatttgccagtgaaaagcttgaaggatgttaaatttgttttgtggacagagacagtgaagatacggagaataacattgccagtggcactgtcacagctatttcagtttctcacaaactcctcaacttccatctatgttggccgtgttggagacattgaactctcttctatctctgtttaccaaggtgtcatcagttccatctagtttcacttgctggttagcatattctctcattcatcatttggagacattgaactctcttgtatttttagcttcaatgttgtgggttggcacttcatgctgcttagcttcttggaataagtacagccataaggtgagtgactataaagtaaagacatgactaaatcggttttaggtaaatggaatcctactgaatttaactcatcaggggactgcaattccagtgcaataccatgtcaatggactattattgatcacaaaggaaaataattgtaagtggttgattacataatttttgtttaatataatgcttactagattctatatatatatatatatatatatatatatatatatatatatatttttttttttacatatttttcaagttctcatctagacattattttaagaactatatttattttaagtcatcattacttacttatcatgattttccttttcttcaaatttacacctaaatgattgtggattagggtctgtggggaggcacaatgtgcgggagttttcttcagattttagtcctcttaatgataatccgtaagaccaactggaccaaggagttaaccaattaactaacatttattgaataggcatttatttttcagcacagaattctcaatttttgaagcggtgttctgtatgctaatcatcctatagcaaggttagatatgtttatataccaattattctaccaaattaagcaattaaggttttatttatagcatgcattatgaagtgacatgaatcaaatgggcgacgcaaatcagaggagcaagtttcagccttcaatcgctcgcggtcacggttgaccaacaggaatctagcagaagaaggatcgagatcgttggggaagggaaaacctaatcgccaaaattaaacaacccacaaacctgtcgttttggttaaaatctggggtctcaccaaactcggtgactcagggccagactcgccattctaatctgagtctacttgagtttgtccgagtttgcttagaaacagtatgtgtgcaattggactcgaggagggacagtagactcttaaaattggacgattttacgagttaaaccatgacaataacccataaaatgagaaaggaataaaaattgtaatattttttaaaatttttgttttaattttgactaaagaaattattgaattttatttttatttttatttcttaattcatgtgtcttatactattaataaatccaacacattattgatttgatctgagtaatattgaattcgatttctaaagtaagattttaaatcttaggaataaaaaaaatataattaaagaaaaaatatctcatttaaaatgatagtaaatgcctttatataatttccttgtatcatgaattagtgctccctttaaattgacaactatttattacttctgtcaaatgcagcgttgtatgtgacacaaaatattgcttcaaattaaaaactaaaatgaaacgttaatcataacaagttgatggaaattatatatatagtgcagtaaattttttctaaagccaaccaccaccttctcatactgaatactgtttatcaatgtatgtcatgggctcatggctacctaaaatactgttacaaaacaaagcttcttgctactttaaatcgagtgcagatactattgaaaaatcttatactgttacaaagcttctgccaatccaacttttgtggactagtaaagtattttccactacgctctaaacttttcatctatgattctttatttaaaatataaatgatttattcctgtgcgcacatgaaattctcgtttttatgctccacattgaggaccataataaaacaagaaagataattacattttcagtgaaaagaagcctccactaacgccatataatgtaatcttgtccttatttgtaggataggaagtttatagcaaacatttcagtctcaaacggagtgttaagggaagaactcctcaaatggagacacctttagtgatccagaagttcacttcagaatctgactacttgccggtgaaaagcttgaaggatttgaagtttgttttgtggacagagacagtgaagatatggagaatagcattccctatggcactgtctgcactgcttcagtttctcacaatctcctcaacttccatctatgctggccatcttggagacattgaactttcttctatctctgtttaccaaggtgtcatcagtgccatctattttgacttgttggttagcacctctctcattcatcaaaagcttagttgttatttgttatttgtttgttcttttgcttttaaacacaaaatgaagttaccaaatccattaatgagtaatttaattctgattttctttcattttcccatgtggggaaaagtttggtgtttagtcaatatgaaagaagaattatttcttgttcctcttcttcttattattattatttgcctgatatgatttgttggactctttataccttatctaactttaatgtgcaaaatttcagtttggtatgtcatctgcattggtaacactttgtggccaagcttttggagcaggacaaattcaatcaacttgtatttatgttcaaaggtcatggattatacttactgccacttgtataatcctcttgcctatttatgtatgtgccactccaatcttaaagtttattggccaagaccacgaaatagctgatcttgctggaagatattccatacaagtaattccctacatgttttcctgtgctataacttttcccttccagacatttcttcaggcccagatcaaggttaaagttattacgtgcatagcacttgcagttttggtcatacaaaatgtgctgctttacatcttcataaatgtatttggttggggtacaactggcttagccatggtgactaatatcacagggtgggtttatgctatggctttggttgtgtataccattggttggtgtaaggaagaatggactggattttcatggatggcattcagggatttgtggtcatttgctaagttaagccttgcatcatctgttatgagttgcttagagcaatggtatggaacatgcattatactacttgctggtctactagacaatcctgtgattgatgttggttcctattctatttggtaagattatcatgttgaactaatttgcagctgtttaaattgcctataatactcacttttctccattttttggttttcctcttgttatttcttggttttcctcatatatttacttttgtatttttagcttcaatgttcagggttggcacacgatgctgctccttggaataagtgttgccataaggtaaatgaccatatagaaaatagtaaattacacggatcattattgaagttccatgaaattatacaaacttttcatattctttttttacccctatactaaccctttaaatgtttgaatagcattaaacctttttccccttcctagatgttattgtaaatattacgaaagtaaggagtctttgtttattttcacgaaaccttagggatgattaattagtgtaatttactccatataaatatttcatatgggtgcaatgttatgtcaatttatgaacttttattggttacaaagaaactgaatgtaacaaattgcttatatatttttcaatcaatacatcgattattggttctgtgccctacagtattcgtgtctccaatacacttggcatgtcgcatccaagagcagccatatactctttctgcgtgacaatgtttcagtctctcctccttggcattgttttcatgattgccattttcttgagtaaagatgagtttgccaagatctttaccgacagtgaggatatgatacgagctgttgctgatttagcataccttcttggtgtatcgatggttatcaatagcgcttcacaagtgatgtcaggtgattgtttgcttttacaacttgtaaagttcattttgtaatatattggccccatctcttgattgttcttctatgtttaccattaggtgtggccgttgggagtggatggcaagttatggttggttacataaacctggcatgttattacgttgttggactccctattggaatttttcttggtttcaatcaacatttaggggtcaaggtaattaataatgttcttgttatgggaattgtttctttactccaatgtcaaaggctgcttatatttacataatttgcactgtaataaattgccaaattaatttgatctccgacttatccattatgatttcccttgaaatttacacacctaaatggttttgtggcttagggtctctggggaggcaccatgtgtggtaggattcttcaaatgttagtcctcttaatcattatttggaagaccaactggtccaaggaggtacgtactcacttgaatttttccaataagcagctttttctttttgcactcaattccaattttttgcattattgatgttttgtatgctatctgtgctgattattctacaaagataaactattacgtacgcttttgttttaatatgcatcttgaagcgccatgtgatttttgggttttaatattgtttaggtgtaattttttccaaatttaccgatttggggaattattattctttggaataagtcgtaatgggttttacttttttttaaaaaaatttaaatattttttatttaattatttaataaatacatgtttctttttaattttatttaatattttgtatatattttatatgattttatttaatattatatattttttaatattattttatatttttttttactaattttaaagaatttgatttgatttgtaaatgaaaaaataatataaaatacttaaatcaaataatgaaaaataacataatcactttagccacagaacagaggtacttgctttgtattcccttgtaaacaattttcataaaagtgtgtctagcctgctgtgcaaatcgccagtgagactgacaatattcattgctggtcaaatcgctagctgcagtggcgaaaccactggaatcgtcagtgagagtggcgtttttgttgctggaatcgtcagtgagagtggcgtttttaccacgtattacacgcaggagtttctcgccagtatcattggcgatttacatgtcttttaagtgaaataacagacccatcgtataaattgtttagaaacagacccattgtaggaaatagtttttaaaaagaaccccattagcataatttgccctataaattattgtacaatatcttggcaaatctatgtctttctttcttataatatcattcactttctctctctctctctctttttttttttttcttctttttatctttctctttctctcatccatgccttgtgacttatgaggaatatgactgcaggtggagcaaacagctcatcgcatgagaatatggagcatcaacaacctccactcgaatgacatgggaaatgttacatgagaaggagcaatgcttcattttttaatatatttatttaccactctcaaatttgtttttattttcacaactaagaaaataaactaaaaccaaacaagtttttattttggctccggcattgatcgtttttcaaaacagtgctgctacatggtgtgaatggatggagtaccaaacatgaattaatctgccttattattactccacaataaaaaggtgacgtgttattgtttatggtgtgtaactattgtttaaaaaataaaaaataaattaaaatattaaaagataagaaaaaaatattaagattttatcccatattctgtgccgctaactgatattatcttgctctaaaaatgattgtgatatattatcttaccaaaagtaaacaaacaatatcgtcaactaaattttgtttggcaaaacactcaaagatcattgttaataacatttttgcttattaaaaaaaaaaaagaaagagaactactactgggtcaaagtattttacaagaacaaacaaatgatcgagattaattcagctcgtgcaaaaatgttgtcaaaagcatagagttctttgtaaaggatagccaaatcactagtattctaaacgtcatatttaatttgaaacctatatttttacatgctttaaaccacttttcagatcatgccatctagcatcagcaactgtggtgcttgtgcagaaggtgggctttaatccgaacaacaaaaatttagcaaggaagaagccattatgataaggtttcaatctgcataagtaaataggaaaaagccattatgatcgatcagttgaaaatgaagtgagaaaggtggtgttgaaaacttatcaaaccacattaaacagccaaaataagagtttagccacgttagttgtgcttctaattcgtgttaatattttgttttcaaaaagggtttcaaaataaattttgaaacctctataattattcatgcttctcttttctgtgaagctgcgctccaccactagttgaagcagtggataatgttgtacaataactgtactgagttactaattttgcgttggcgttacttgtccttttctgtcctccctccaatgtgaatggctcatcaaaaaaatcccactccactatgtccaattgtcagtaacttttgtttgttgcaaagtgcaatcatttccattacattattaatggcaggctcaatatctcacttggttttcaaaagtactagatgctgtgttatgttaatatttcaaggtaatacaatttaaaataactttctgtattattagtctagtctttaaatttaactttctgtattatatgtcaacatccagtgagaaaaacttggaaatttaattggtttgtgttgtactgcgaaggaggaaataatatgataaatatatatatatatatatatatatatatatatatatatatatattttttttttttttttaaaagtcttacattttatacgctaattttgtatcataacaatgttttttcttgcaatgtcaagttgttgttctcgctcaagattaagtaaaattttacccaggcttaaactttggtcataactggtctcacttaatcactttagcttaaggtgaccacaattatgcatgcttaagctagcatcgaactacacatgtgggcttgggaacacaacttggttaagtttgttatctttggcccacttaagcaggcccaaagaagtctacataagcggtggctgtgagtcctaaaacccaatttttttctttagcttaagcggttcaagatgggctcgctctagctagggtcttgcaactacaaaaacaaagcatgccatttaatggcttcccaaggttcccaaaacgtaaataactttgtataaactcaatttttggattcaacaacgaaaatcaacatttaaaacaacaaaacacattcacaaacccattaaaatcaagaagatcttgatcctaatcaaaggactacctcatattgaaagcaccaccacctcaccatctatgtaaacacaacccaaacatcactcatgtagtctttacataaaaaaatagcatgattcaacctaaggaatggaaaagagaaaagaaaggaagcttatacccttcatgaatagaatcctcccaagcttaagaagagaaggaaaccaacttgccatgtgaagattcaatccctagcttgagagaaatccatgggaagaaggagagtgaaggaaggctttgagtgagagcatatttttgaattgtgaagggatgggggaagattttttaatagaatgttttttctttactcctagctggaaacttttactaagcccttccctctcaactttcataacaaaagttcatccttccatatgcccatgtcttacaaaaccattaaacccataacaacacataaatataaacatataatttatcatcaaataaattttaattaattttgttcgaaaacataaaattaaattaaattccttttatatatattaattaaactacttaatcatacattataaaaattttacggtattatatatagtattcaaatacattagagttaattgttcacgaaaaatagacattgtatataatgaaccctcaccttttttcttcaatgtcagaaagaaattgtacaaagtcttagtaatttaattaataatatgtttggtttaatttattaagattctttttcttatatccatattctgacttcttcctcggctgccccacgttacgttggaattaaagaaaatattaaacaaattgactgaacagaggtgaaacaatgaattaattaatttaaattgatgcagatgcagtctctattgacctgacaagtgattctttccccagaaaacaactactacgtatcgtgttatttccgtgtggcaactggaccaaatctatatagagaatgcctaatccaatctttctttttcatgcttacaattattattgttattattccttctggccatgcaaacgcatgctcactcttgccatgccccatgtcgtcaacgtatatgagaaaaatatccttttgacgatgttcgactataactaaattagatgccagggattcaattagattaatgcaaataacaaaagataatactataattaagttgtttatattttcttcgtcgaactttttaattaaataatactaaatgatatgggaaacgaatcgaagttttgcatatgatatatttttaatatttgtgtggttattaaaaagctgagcaagccattatgttaattccgtataggataatttgcctatgaaccgaatgttaaattcatattattttgtatgatttgataacattaagaagtggaggtgctacattatattttttaattttaaacaattagcatatatgattagaagaacatgcatgccatttaaatttttaatcacaaataaggggggtatccattccaaaagtatcatcatgagatttttataaaatatctccatatcttgcagaataatgatgtaactgtaatgaagtcaaaagtgaggttctaagcaccaacctcagttacatacgtaaattttccttttttatatattccccacccaagatgttctttcgcacgttgtattcgtccgtccccaaccatacctatcacctttttttagttggcaaaagtcaaaaccactcctcaccaaatgttaataaaatcctctaacacttttgttatttttttcctgacactcattattctcctttaaaatttataaatttcgttcgagatatattaaataaaaacaaacttatataaattcactaatccaaataaatttaatttagtaataaatattaaaataaaaagaatgtgttataaatataaaacttaaatgtattttcattctacgtaaaacaagtgagattgattttggtttctattaaaaaaaattatgtcttttatccctccaaaatttaaaattcttacttttggtccatataaaatgattaaataatttgttttggtccctatatttttttatttgcatccctccaaaatttaaattcaaacttttttagttcctaacatttaatataaagtagataaataacattcattttaaaaatatagaaaacttttcataagcatcgcatgctaatatgatacaacaaacaccagtgagtatcacttaagattaccactaagaagcctttcactaaacacaaacactaaatgagtatcacattataatagccataacaaacaatgatttcatatttttaagaaatgaaaataaaatatagtttatacaaactaaaatcaaaacttacatatttgattgtgactacaaacatatttacccttatatgtaaattacataatatatgctgatcatctttaattactaaaaattatattgttgaattacgaatcaatttaccaaaaattaacttttttttacagaaaccaaaaaattaacttaagagcaatcattaattaaattcttacaattaactacaaatccttgcacttttcattctgactcttgtctctcatggctagctctcccatatctgtttaaactattatatctcattttctcatattttatgtctcttttccttttctttcaataataataatgaatattaaataattaacactactaataaacacaagcaggcttttttccccatggataggctggctattcattaaaatttaattattaaaattatatagaatcgtatagtgtggcagtatatgctattacttgttaccctaaaagtctaaaacctaagggctaatacatgccacttcccatccccacgtacctataaaacccacaaccctcttcatcattccttcgtgttttctcaactcaacgttctttctatttcatcatttccactcactcaccattcactaaccaacttttactatggcttctcgctacgaactcgagctgaagctcgcatcagcgcgcggcctcaagaacgtgaactggcgccacggccctaaccgcccatacgccgtcgtttgggtggaccccaggaacaagtgttccacgcgtgtagacgaagacggcgataccgaagccacctgggaccaaaccctacttattcctctccccccggagcccctcgagaatctcaccctctacgtggacgcggtccacgccggctccgaggaagataccgagccgcttattggagcggctcagctcaagctcgtcgatattctcgacgaggtcggagtcggcgagagcgtgaaccgcacgctctcgctgaagcgtccctccgggagaccccaagggaaggtcgacgtaaatgttgttataagagagtttggctatcgtgcgcatggcgggtactacgcaccttcttatggcgtgagggagagggattattctgcgccggttcaggatggttataattctgcgcctcgaacggcgtcgtatggacagggatatgcggggcctcaaacggcgtcgtatgggcaggggagtggttatggttacggttatgatcaagaagagaagaagagtaataagtttgggggcatggggacgggattggctgtgggcgcggttgctggggttctaggaggaatcgcgcttgtggaaggtgctgagtatgttgaggacaagattactgatgacgtggcagagagggttgaggatgatcttggttatgatgaagatgatttctagagactcagtactccaatatgaaaaaagagagtaaaaaatatgaacaaatatcttgaagcttttattttttctttgtttaactctgttgttactgtggttaattgataaaggttaatgcatctggttatgtacactttgcatatgttctttctttctcttttcttattccctcacttgttgtctgtcgtgtttgttacgattattgtagaaggaataatggtttttagaattttcttaaaaaagaaacaaacattttaataaaattgaagaaatattagttgattgagataagacgatatcgtttatgtgcgtagtttattcattttagggaatttcatcaaagtgaggaattcttaaattcccataataccttcgaaaagtcacacttttttcttgaataaaaaatatattttaaactttttatcatatgacttttggcgaatgattatttttattatcattttgtgtgtaattagtgtttgtgaaatgtatatgcactgttttattatttgttttttatgatatggcttttggcggatgattatttttattataatgttgtgtgtgaaaaatatatgcattgttttattattttcactcatatgtttgtgtgcattatgccaagacgtggaaaacggaataacctatatcgttctataactttatccattgctttgagtattggcaagaaccttatccatgactatccattgctttaggctgcggaatatattaaccttttgcttatgaattttatgtttttctttttctttttgcatataaaaagagaagttagaaagggtttaaaatgcaagataagctaaactaatgggtaggaagtttgaatcctttatgtatttttttttttcatttttgaccatttaaagataaacgtaagaacaaatgaaataaagctaaaattacataaagatcaaatcattaaaattaaattaaattagaaaagggatagttgaaatcatcaaaataagtaattttgtatgagttttgaaatcattctcacaaatattagacgagtcttaatttgtgtgatatggtaatacataagcaatttaataagtaactagttagttgtgcaaacaagtttgtataattgaatattgagtatactgtctaatgtacttttttttattatttgactattgaaatataattcaatgacctatgtttatagttttcatttcttataataactaatattcacaagagtatattcatgtaacatagagagagcaaggaatcaaattggcttttaagtgtaactcctcattgatttggttgttaactatgagttactcgttaaccgtgagttactcgttggaatgcttagacgcactaacaaattaaaaaagatgtgactattgtgctagatgaacaaaataggctttgggtgaggataggtggaagttagtataccatgaatctttgctcttaccaacagatgaagacaagcatgaggaaagtgactccaaccaatcatcttcatggcaaaaacaatagttaaccaaacaaacatgagatgttcatgataaagttgatgaaattatgtgatatctaatattatatataacctttcatggctatgataacactgcattgtagtgtttcattttaataaacaataaaatacaatttctaagtttttatctaagcattctaatgatagtgtgtgttttatttatacttaatgaatgtttactcttaatacttgacctttgaaattgatctaaagaagcatagttataatagttagtttatacatgaatgatgtataagctcaaatagtatcactattagaaaaaacatcttcatgatttcatggatatttgatgacgattttaaacgtctatgaagacaacgtcgtggaaagttaaatgattttcaacaaccctatatatcttctaaacaaaattgaggattctaacaagtttgtttgaaactgaatatcatggtatccaaccaatcttctcatctcctcccttccttagggtcatcgccaacccgaaattatgtcgacaaatcttcccatggcagctgagccccagacatcctagtttgacccgaccgggcaaccattcgagtctgacctcatattggctaccaaggtcaaggacaagagttcggccaccccttcctctccaccctggatagcactaatctttattcgctcattcttacccctacttaacttgggattcatgttttttcaaccccttaaagacaatgcgttatgaattggggatggtaggaaatggatacattagaggagatggtctgccacaggatgatcctccggctcacttcttgtaaatcaggcaagctctctttcctcgccgtctaacacaaatgatgagaaattttaattgaattctataaacatatataacttttacatacttaaaattactaaatttgaaaacaatcttattaaacatgtaaggtaagttttatatacctcaacatcatgagtctgtgatgcatttctcatagtagcaagaaagtggacatgatattcatcattcaacttcctaattttacttttactgttaagaattattataccgggatacataataatgcaaaagaaaaggacagagttagttaggagaaggaaaataaaataaacctcaatgccgcctctcttttgtgacgaataaattaaaacaaacaagacatgtcaaaatacaacaaggtttaggacagaaacagaacttagccgatacaaaactttgaatttactatggtgttgatttcttgttaatgttttttcattttttctgctgcggtacataattttcttgaaaaacatcctgatcaaattttaattagatggattttcttcaaaatttaaacatatattggaatggattcaataatttgtgcagattaagtttaatctaggaaaagaatcataaaataaatgactaaaatgattaataaacataaaagagtatttagaaaattacacgtcatttgatgattaattaggaattatgtagtccataaccaactaataatatctctgccctagggtactataataacattataattttgcatctaaaatgttacaattaacataaaaattgccaacatcttagacaaatttcatttttatcgttctattataaagaagtagcagatgacaatttcctaattcatatttacttcgacaaataaccggttacaaattttgttccacaaccttagattacgcgtccccagctgacatgtaaacatcgcatgcatgcttgtgcattagattttctttttttcttttcttttttgggaaacaatggtactaatgtttaaacctataaccacatccaaattgttatactagcacgttcttagtggttcacttgtgcagtagggcaataagctgacaaacatcgtcatgtattacatgttgttctagttgcctaactcttgattcagcttcttcacacttctcttctgcaagtggaagttgtggatacacctatcaaaatggtgtgccaaaaaaagaatgtatatattaaaacaaaatcatttttatcatgaacaatttcatgttcttcagccgtattattattattattattaaaagacagcagcagtattcacatgactgctaagtaagttacatctaatttatagcccaaattatatatgaaactaaaaagaagctattttatcaatatcaaaatctgaaccgaacgttcttacatttgaaatcaagaaaacagatgtcacacgatttctttttcaaaaagcacatagcattacatatatgatatgcgttggagagtaaaatttgtatctcaatgtgatccctaattaatttcattcatggcatgcattttgaacctatgattaaaaaattatgtgataagagggctttctggcaaaaaggaggaaagcattggtttatgcccacccggctgaaaggaggctttctggccggtgaaaaagaggagagaaggggagaaggagctcacagcactctcaagtgagttggcagggacagggtcttctatcaggactcgcagacaacttccaatgccttccaggcagaatgaaaaagctatggaaggacgtccaaaagggactatcttcatagtaaagaagctacgcatgattcattatctgattttgtcttttattgctaaaatctgatgggtcttactaaataacctaagatatctctctattagtgaagaaattattgtatggtattctcttcatccatcttcattttgaattaatttacatcttgttagaatataagtatgaggtgaaatcacacattaaatgaaagtaaaaaaactgagcacactatataaataaagaaaaaaactcataaatttaaacctaaaggtttaaattaaagtgtggtgtcaattttttttaataattattcatgattcattggtgtaaatcttttcaatttttatttccttcaattccccaacatatgtgaccattattaactctttttcatattgaaaaatatgattacatgtcacatggaacaaccacaccacataatgtaacatgaaaattaatttacttaatgagttgtaaaaattggactagcatttctcctatacattaattggaattgaaagagtaaaaaagtcatattattacataaatgcagaaaagaaccaagaagaggaagcatatgatgaatccatagtgtctaataatttcttggaaaagaaatgtaaaagcaaataagaacaggagcaggcagcaacataccttctatcttttctaatatcaagaagaggatctatgaaaaatatctcctcttcgacatcaaaatattctcatgttgacaatagatattcaaattagcttgggaatgcagggatttctgcaattcctaggtgttcaatgtacatccaaataatttataactacacacattcaagatactgaatatgatgttcaattactgagacatcaaaaagtcccataagttagcaatattttagagacatacaataacattctcccagctgcatacttaattggttaaatggagtacatgatatgagaaggagaagtgaatgcaatcataccacattctgggcaacggagatagtccttttccttttccctaagaacaagccctgaccctccacacacctcacatcttttttgagctatctggaacatatccaacaatgaagacatgaaacacgggcttcataacttatgagttagcagctcaaccaaaaaaagtgacttacaattattttgctaaattcaatccctgccaccacaaaaggggtaaccccagctgcaaaatacaaacacacaaaatcaaaacccaattcctgagcaccattctctttccataaagataagcacaaaacataactgcagtcttttggtgctgctctctaatcagaattgaagtttcatctcgataacatgttgaatgcaaatctttattaagcagattgataaaaaaaaaaaaatctctaatttgatttaagaataactataaaaaacaccctaataaactgcatgcatccaaagttttgtttgtcctataaaaacaaacatcacaagtaaagtaaaatatcaaaggttgtgctgtgtgacttaaggtacgtatagctccaatttgccatgtgacttcccccggagcagggtcaagtactgtagttatgattttgaaatcgtaaaataaaaataaaaattaatgactttgaagttataaataaaaaaaaattatattaaaatcgtaaataatatatgattttagttaaaaaataaaaataaattgtaataaatgttactacttttttcactaggaatatgcacccactagatatatgaatataattttgatatataaataagaagactaaataaaacatgccccaccgacacgcgacgccatgcacgccaacgccggagtacaaaccaaaatatgagacctaaacgattctctttggaaaacacgaagcgacaaaactcaaatgaattttattactttagacaaaatagaatcaaagtcactatcaactcaccatgcacgtagcaatgaacctttccatatgtcaaattcaccaccaatgctaaacccgtaattctcccccaaaccccatgcacctataaaaccatgaacaacgagtgaacgaaacggcgaacagaacaacagcaacgttaacaatgggttctcggtacgaagtggaagtgaagcccttatcagcacgcgcgctcaagaacgtgaactggcgccacggccccaacctcccctacgtcgtcgtttgggccgaccgaagctacttactctccacgtccgtggacgagaacggcaacaccgacgcgaattggaatgaaacgctcacaattccgttgccggctaagcccctcgaggatcaaaatttgttcatccacgtggtccacgccggctcgggggaggacaccaagtcgctgatcggcaaggcttggctccggctggtggatattgtcaacgacttcggaatcggtgagcgcgtgagatgcacgctctcgctgaagcgtccctcggggaggccgcaagggaaggctgaggttagcgtgaccatcagggagtcgagctatggtgcgcagggtgggtacaacgcacctcccaacggggcaccaccacaaaaggcgaattgttacgctacgccaagtgggtatccttataatgcgacggcgaagggatgggctacgctcgctgcggtttttggtggaatatctgtggaagatgctgagtatgttgatgacaagaatcaagatgatgcggaagaaaaaagagtggaggatgatcttggtgctgaggacaagattcaagataacgtggaagcaagagtggaggatgatcttggtgaccatgctgatgatgatgacgacttctggcgatgacttctgtgatgtttcaggaggagggaaataaatggaacaataatatttcaagtttttttttttttattttcagttgaaaatatttattatatatatatcctttttattaatgatatcaaaataatcttatcaatgcttatcttcgttgtctttttctagcgttgaaaattcaacaattaatttgttgataagaaaaacctcgaatgttttgtagtaactcttgaaattattgatagcatttgatgaaactaaaaacattaggataaaattttggtttctaattgcgagacttgatgagaaggaagatttcatatctgttgaacctgaagccttggctattttagaggctgttaatatgcttggtgatttaggatactatagagccattatagaaactgactataaataaagaggtggatgataggattaaaggaaagtgtacgaccctttctgaattagcagtcattactagtatttgcaaacattaattggctttcttagttttcaaacttagaggtaagacaagttaattgggtcgctcatgttagttttcagtttttatttatttattattattacatttcatcttgtattcagaattacatttctattgatatgatataagctatttgctttaaaaaaatgaaacaggttgcaagagcttttacatcgtttgggccgaggtattgttctgggaatatgttgttggatggttgttgcttcgaaaagaatacaaataaaggaatgtttggacgttacattgcgaaatgtgaatttcgtggggggaaaagcgtaacgggataatgcatcgtaagcaatattaatgtttcgtggttcattgaaactttttcttgggaagcatttaaagaagtccagtgtaacaaagtgtattagccatttaattttcccagttatgtttggaccgagacaaatggaggcaccaccacagaaggtgttatgtgtgtctctgtgtgagctagtggcaaattcgatgagtttgatcagagtcatcttggagttactactgagacgaaactaaatgtgttcaaacccttaaatgaattaatttgtgggagggattaattcttcaaaagagacctatatgtttattaggtttgtaaatttatatatgaatttaatggtgatgaaaattaatatgactaaatttattagagtaaaaattaataaatttatcatatatgaaatatcattaggtgatacattataatcaataatatattatctctttatatattatctgaatttaaagtcttgtatttttgttcttttaatttttatatatttgaatttattctcacaagtttctatgctctttaaatgcttattttttatttaatattttaattaaacttttcttttctacacatatatgatatattaaaaaattattattttaatatttttttttctttattatctttacatatgtggataagggatcaagttattctaaaaataattgtaagagaatttagtccaaatatattttttattgatttttatttttcaaaataaacaaccctcactaattcaccgtgtggaacttgctattgttttaaatttggtatagtataataccgtgtgaaaaccaaatcatactgtttgtaaattttgtaaattgtaaactcaatccaaaaaattaaaaattgtaaaaaccaaaaatctaaaagatgagatatttttttggtttgattcaatttttgaatctggttataaaaaatataaattaaaccaaacaaattatatattataattatattgatttttatggtgataattaataataattattaaataacttattacttttcatttgttttataatcaacatgtacatcttacttccagtatgttaagaaggatatatactaatattattgttaaaaaatagaattaaatatcaaagtgatacataaattattattatattgcaaaaataaataataatattattttataataattttaaatagaagtgaatataataatttttaactaaaatatgtttaataaaatttaataaaaataaaatttaaaaaaatataacttatatataataattatgtaagtttaattgatagatttaaattatgataatagattaaaaaataaaaaattatgaaaccaaatcaaaccaaattataaaaaattaatttagtttaatttgaatttaatgttatactttgataaaatcaaatcaaacatacattttattttatatttaatttagatgattttttttcatctaaaaatcaaaccaaatcacacctgtaatcataaaacgaaactaataattagagctataacaatgcagtcgtactatcatgagctttctaaagtgtaaagaataggattgggttctctccttgtattctttgtgactttaacatgcatagagatgttttcgaggagtcttctcttggagggttccattatgccagtttaattttgattgtttgtcaaggctaaattatatcttgtgaaattgaaagcaaagctcatgtaattacttattagtgatgaaatgataaaaatgaaatttcaattatgtgtttaggtaagttaggtaaatttatgtcaatttttttaaatacattttttatatttagttttattattaattaattagttacaaaaaaaatatttttatcaataagagggtttagttcatcaggttggataaagtatataaatcattgtaaatcttctactagttgtatttgattcctatggataaaaaagaaatatatttttatcaataagagagcttaattcatctgattaaataaaatacataaattattgtaaatattatatttcttatagccgatcatcactggtaaaaaaattttttatcaactctgttggttttgtaatggcaaattgatgactacatttttgttgaaataagcatgttagggttaataaaataaaaaaactaacggccaaattcatatgtttgttcacagatgataactaaattattgtatttattaaacttggcctttgacaattagtaacaactaatggtcatcggtaacaaataaaaaaattccaacaaattgttattgacagcttctttgttggtagttgttattttttcaaataaaataaaataatttttaattttaattttaagtaattgacaatattagtattttttgttaaagtattatttttagtctctttttatttattttattcattttagttcatttactattaaaaagttgattttgatctcttatatattttaaaatctaatcaatgttattttacatttcaaatactttggaagcttaaaaaggtacatgaaacaacattagaggtgcaggaagcaattgcccaatatccaacccaaaagaaactccaataaattaatcggtcatagcgtcaaaaaaggaaggtccattatctacgctcaataagggaggggtgtccatataatgaaaggggaaagggtattaaaaggaatagtctcaaacaggaaagaagtatattacattatgaagcaatgactaataagttattggttgaatttgatttttttaaataaatttttttatcttgtaaataaaaataatgtgattgaaaaaataaaatctcttcaagataactagtaagattccttgacaaaaatgaatgatcgacaaaatcaataaatatttcgtatcaataatataaaaaataatattatatgaagaaatgatataagaaagcaacaactaaattttctgaaacatattggtttattttctaatttttaaaatagaacatcaagcatatctagtgctcctgttcaccgattgatttattttctaatgaaatcctcttgaagtataattataaaactcgaattaatcatggacatagtaagtcactagatcagaagtcaaccgaatcacccactagttgacttgaatgacttagtataattaatatatatatatatatatatatatatatatatatatatatatatatatatatataatattaatttctgcatttattaatcaaatagttgtgatagtttagtggtttggcacctacattcttcaaggtcacaggtttgatccagccaagggatttttttatttggttaattagttttcattcataaagctaatcttcttttaaaattcatgagcatttcttctcaaaaaagaaatagggaagctgcaagagtagtgttgtcagactcgagcacattcatttcaacaagcaactcgagctagcatatttaaggaattatttatcatgataaccatttgatttagaggtaattttataattaattagaggacaaaatcatataaaaaaacgtgtaaaccaaataagataattgctattatgataattatagattatacctattctgactacctatttcacccttctccaaactaattcaacccaaatgcagaaccattttactctgcagctgaaagagggtctgtctgcttactcaactgcgttcacatggttcgttctatatgcattatttttttcttttttgggtatggaagcaaagtgtcttgtcatgattcaaggactcaatgaaagaaaaaagaaaactaaaaaatgcatatttattaatgtatgattattttatcaataaatgttaattggattagatcctataatttttctcttccttatccgctaaccctttttgatgcatgcttgctttctgcttcacaacataaactcatttcaactcacgtttatttcatttggatttgctacactatattgtattggaaagtgatgcatggagttctaaatggtagatgacacttaaagagataaaaagataaatataaatataatagatgatataatgtagtagcaataagatcataaacttagaaaatctcaaggtcctatgatatcgttggctatgctattgttaactcgttgacaagtgcaccaaattatcacaagtagtacagtactcagaagtccgagtgtcgaattcacagggactttgtttgtacttagactaatgcaaacctaatttacaagcaaaagataagaaatttaaaataacaaatagaaaaagatagaagataaggtaaaggaaagataaaagatttaaagataaaattagaagataaagtaaaagataaaagaattaaagataaaattaaaagataaagaaaagataaaagattagaagagtgaaagataagaaagataaaagatttagataaaaaaagataaattcaagataagatagtgttgagaactaacttgccttgtctgcttaggatgtatgagtttatgattttttttctttaccaattcaagtgatcttatcctaccaacatctattcatttatttgtccctgatgcctcatgatgacaagtctattttacatatctatctcccaaatgtttttgcaaagtctcaatagataaaatgcatgaagttctaattctagatgtttgctttgacgcatgggtataatgcaatcgctctatgcctagcaacgattttattatgatatcttttcttcttgttctattataagttatcatctcctgagcgtctaacccctaaaactaatgcatgcatatcttctctaaatcttatttagaaagttatcgtctcccgagcatctaacccctaacagaatataaagatgagtatgcaagataaaaacagaaaagaaaaacctggtattgcattgataaatagtgaatagcacatcatacatcgcattggcttctaggtctgctaggctctaactaagggtttagccactcgtgatcattgagggctttacaatgaaaaggggtgaaagaaaaaaaaaagagtaaatgaaacccctaagaaagggggttctgccgtggtgtgttgttgtccctcttggactgactctctatttatagtgctgaagtgagttttcagcgcgacacccctcgctcagcgcgtgtagatcgcgcgcttagcgcgcgtttctgttgaatcgtggacttagcgcgcatcttgcaggcttagcacgttctatctcagttatgtgcgcttagcgtctgttgcgcgctcagcgcacatgacaactctcgagcttaacgtctcgcttagcgcctatgtttcctggtccgcttagtgcgggacgcgcacgtattaggctgggcctacttcagattttttttttcttctttaatttttctgactttttttgctttttacacctccagtttttatatctgcagccaaaactcaacaaaacatcaattttttaatatttaagagcaaataactgctaaataattatttttaaagataattttatttgattttttagtatcaaagtacaattatttagcagttgaattttataaaattgaaattaaaaaaaaaatctaattttctaaagttaaatgtttaatcctcgtacctaagtgcgctgtcacggaaccacgagagtttcaaagggtgggtccttttgtacatctagattttatttatttttgaaagctttacggttagaatttaatttaaagcaattggttagcatgaacaattgacaatgtcaccgtaggctttcggctttttatggaagccatgaaaaactctttttccatctaattagaagacggattgtagatggtagtttaatttggagagctttaattaatgctactacaacaagtctaacattttgactgggaattttctacgtggcccccagtgatctcattaatgagttatgttatgccaagaaacgagtccaaaatagtaactatgatcgatgctcataaacacataggaaggcaactgttatccaacatggcttgctatttatgattaattgattatgttttacaacttcctttctagttcatggcatttctttcttcaacttattattttttttattcatttcttcttctactctgaattaattcagtcatcttcctctctctccatctctattctttttattctctggtgtatagtgtattaaccttgcttcatgatatatttaatattaacgggtgtactaccaaaagaaaaacaaaaagttaattaatgtgcctgaccagcccaattaaatgattgtgtgcaaaaaaaaaaaaaccaatgaaacaaatataacactaatttctaaacactcctataacttcttttaaagtatttattataaaatttaataatttttaattatatgataaccataattgaataagagtataaaatttgtttatgctatcggtatgttccaattaaaatttacattaaattatattgtgtatgtattaatttgttatgttgaataattaatattaattatgtctctgtgtgaggtttgtcatgtaaaagaattcgaaggagaccaaatctcaccaacaaaatagtattttatcaaaatatttttcttctttatttggaaaaatgtcacttatgtcattattggtgagagaatttgtgtgaccatcattgatatcatgtcattaacattaagaccaagactagtactaaaaagcaatatttgcttaacagaatggacggcgcatgtccaaatgattttaattcataatctgaaagtgatgttaagtttaagctacatattcaacatatactgcaaacacaattaagtttgatagaaattttagatttcacatacacgtagtattaaattgagtttttgtaatttgtgacctaaagtaattttaaactaatcagctttagttttctatcattgaaactaaaaagtaagttgtcttgaacctaataatttgttagactactgttggtggcttttaaaaaattattggttgaataacctgttgttttgaagaataaattgcaagtatattaattaagcaatatattgaaatttttagtttaaagaaaatattttgaaaaaatagattatcaaataaaattttattcaaacataatataaaataaggtaaaataaaatcccacacacaatccccttctttaaagatcaatttttcctaaaggaagaaaaaagacaatttttttatcaacgcaaattgttaggtttttttatcggcaaaataaatatattaaatataaccaaggtacctaaaacccatatacaattgatttacaattatctatgaatatcgattatctgttatttttcattctcgtatcaaaacggataatagacaataagcatgctacaataattccaccatataataaatgcttcaatcctcaatatgaatacaaagtgccgcaaacacataaatattcaccactacgggtcatttcttcctgcagcaacaatcaccttttgagtagcattagatatcaagagtctataacatcaaaaaaatataacttgaacaaataagagtctacaataattccaccatatataaaaaacattgagttacaccaatctcaattttttttttccaaattgggactaaaataatcttaatctcttgcgggatagagaaggggttccttttcttgttgacattgaggcaaaacttttcttttttgagagcgatcaaggctaaatatttgtgggatgagacatacatagaggtggagaaaatactattgaagtaactgagtataggaaagatgaaattggattatttgtgttttaaaaaataaaaataattgaaattacataataaccctttgattgatgttgatataagatcaaagaaaattggttgttttgttcaattaaaaaggtgtttttcttttttaaaggaattgaaaaaatgttaattgttaacgtataccttctaatttttaagtaaattttatattaacaaacccttcataaaaagatctttgtacatcctaaataaagaagggaactcttccaaaaaataaataaagaagggaaaatttatctgcaggctactgtgcgccaattaccttttacatcatgtaaaaaatttaatcatatgaaacgttatttaattaataatttattcataactgatcacaaatatgactaagatattcattaattaaataaatgtttaataaataatttaatcatataattattcctatgtgttattgtttaaatataataatttgattctgttaaagtgtaagtaatattatttaaatgtagttaattattaatactattaagtcattatttgataaatataatttattaatttatgtaatttaataatctaaactaaatttttttatttttatttttttacttaagtcaataacccaaataatgcttaaaagacactcacgttaatatgattacttttttctgttaatcacataatttatgtgcctttgatttcatattgaagaattaattttaaatctaaaatttattttacatcaattttcacatattttattttaaattacagaaaattttaaaatttattttaagtctataattaatttgaagttaaaataattttaaataattttttacgttaaataaaaaaatttatattttatttttaattttattataaataaaaatatttaaatataaattaaatcactttaaaattaagttttaatcaaaaataattttattcaaaattaattatacgaacggttcatccgtacatacatttaatatgttattgtaaggaaatcatataataaatctgttagttaacgccttttgcccattctttgaaagttcatatgtagagccgcacaaatttcaaggcgatttactttggcatttaatcttgcaataaataccctgacagaaaatataaaaatctagcaatagaaacgatcagttccgaaattgcatcatttaaaaagttttaaaatgaatatatttttttcacaatcatattagtatgaaattatctctattaataacttaataactgtaacctaatacattattcatcatcacttatcttaatttattgatcattattatataaacaagtatacataattatgttcatgaaattttaaaatgagtctacataataaccgttgatagataaataaccttgtgtctagagtttgtagttagggggattagtaattggtttttagttaagggatcctttgttcgataactgttaacgatatactagttttagcatatttttattactatgttaatgatatttgacggtatattattttctttatgataataatgaacaatcaaaaggaatactttttttaacatgttgttttgaatgatcctgaatttaatctctttgaataaagttacgagtttaagtttatttaattaaaaggaaaaaatcaaattaaagataactaatcaaattgattagtcagcgagaaaattgattaatattttataacaataacatgattaaagaaaatttattctcaataaattaatacttaaatattgaataaaataagagaaataaattaatctaacgataaatgagagaaaacataaaataataaattaacacaattagaatctaaaaattaaaattacaccatcacaatactaaatagttaaaaaagtaattaaatgtggaatataaatccatcttatcatcatgtttaatatattcttacaataactttcttatataacaaaaattacttgccgattctttaagtaatatacttaaaacactagttaaaaagaatatttctatttatagaatatatatatatatatatatatcttttgtatatttcactcaaaacatatattgagcaaggttaaccaaaagatgtcttgattatggtcattcaaaatatgtatcgatcaaggttgggtgaaagatatcttaatcgagatcgatcaaaagacattccaactaagacaaagttagacatgctatgatcaagatgtagccaaatatgtcttgattaaggtcaaaccatatgttatagttcagattaatctaaagatgcttcgatcaaagttaaccaaaaaatgttaaagctaaagttttgtctagaggataagagatgcgatggttgaggctaggtcgaaaatctcttaaccaagattagtcaaaacaagtcccgatcaaggttggatgaaacatgtgccgcttgaatccaagaagaagacgctttgacttgaggttggactaaaaatttcttgatcgaggacaaccgaaaaaggtcccattgaagctagttgaaagatgtcccatccaagatcttactaagattgagataaaattattttgattgaggccaagttaaaaatattatttttgacaattaaaaataatattttaaaatatatagtattgattatacaaatatatgattaagttttgaaaaaaaattaacattttttccttaattcaaaaaattaacttttaacatatatttttcaattgtctaaccatggttaaaataagcttttataacaactttgtactttttgtcattatgacataaaatatgtattattaattttattaataattaatttttattaaagaatttgactgattatttaaaataaaatttcatcttttaattatatatttttttatatttataatatttaaatttaagtgaattgaactcaacctaacataatcttagtctcgattttatatttttgatataataaatgtttactttctaattattttttttttttgtttctttaagcatgacacttgatgtatattacacagaacaaaatctatctccttggaagccaaatatagctttgaagcatgagtttttctgatgcttaaagaaacaaaatctactaccaaacatttctgcatctataattacatcctaccaaactgctaacccagtaagcgttattaattggtcacaactgctctcatgaattccataaatgctgcccaacaacactgctctataataatcctctaaactcacatacacacatcaaatcaacattcgtaataatttcttccatcagatatattttcttcaaaaacaatggcaggcgaggtggtgaagaaggaagactctctcaacctgaaagtcactaacaagagtcatgttcaacctgaggagaaaattggaaggaaagagtaccagctggtcacttttgatcttccctacttggccttctactacaaccagaagctgctgttttacaagggtgaagattttgagggtatggtccaaaaactcaaagttggacttggtgtggtgctgaaggagtttcaccaacttgctggtaagttagggaaagatgaagagggggtgttcagagtggagtatgatgatgacatgcttggtgtggaggttgttgaagctgttgttgttgatgataatgagattggtgtggatgatctaactgtggctgaaattagtaacactaatttgaaggagctgataccttatagtggtatcttgaatttggaaggcatgcataggcctttgctggctgttcaggtaatataatatgtagtttgttcaaatttccatgcatgctgatttaattagtttttatgttcttgattagattagccttttaaatactggaagtcatcatggtctaattaaagggtcaacatatcattcaacttcaacttttcttgtgtaaattaatgaaactgcataatgataactaagttcataacagggggtgggataaaacaatgaatatagggaaagttgtactaatttaatttgtagcagatctaattttaaaagaggttttggatggctcataaagcaccccattttccataacttccaaaacctagtagctatttgatatgtttagttttgagcttttttttgggggtttattttcacctattagtcaagaaagggagaagattatttaaattgaacatttgagttgatgtcatcaaaaaacctctttttcctttttcctttttctcttttgttccttctatttagatcaaaccatctagctatactaaaattttgaaattagatgcaagacattgggtgaatgaatgtctttctcatatacctttttagatccagggggaactgagcccaccaccctaagaatggtgtctataagaggttagtaagttgtaaatcacaaatgaatcataaattaagagattactttctgctttttgcaaaataatataggtaaaacatcaaatcactactcccagtttccgtgtctcattttgtcaatgacaaataataatttaattgtcgaagattaaattttggtccactaataatgcatatgacaatcatttaattggtaaattatttaatgagtttcattataataatagtttttaaaaaaatgactttccttgataacatatcaatacatggtttggtgatagtataaaatctttataattactataaattaagattaactcaaaactataacaaatgctcatttttctgtcaaaaaaataaataacagatgttcatttgagtgtggctcaaatgaaaaataataataatacaatgaaaatcaagtttatgcaaattatgcatgttatattgctgtcccaataaatatactattcatagatgttacaagacaaaggttcatttaattttttttcttctgaaatatgtttaaagtctatacttcaactctgaagtctaaatgttatctaaaaaacactctgaactctaaatctgaataaagggccagttgtctctgtcctgtccccactcaacagcttgtgagtgtgactctcaattgagtcaattcctgtccccactcatcccctgttttcatttttacaataacgaaaataaagtttgaatttctgagtctaaaacttggtataatctacccaaatttccctactagatccatcctagtagatccccattatatctttgattctgaaataaggagaacaaaagaagaaaaaagactgagagattcgtccaatttcaattaggtgcacataaggaatagggaatctaatccggtttcaaattttatgaagaaaaaaaaaagtaatgtttaagaagctgcgtaagttgttcatacaacgaaattttacaagattttaatgcaaatgaggaaatttgactattgaaaatattgctgaattttaatttccaaaattaaaggccattttattataatttttcaaactttaatagaaagtaaataacactagtaattgtaattataagccacatgcgtagctggtcaatttatttgacaaatagggtgtgttaaattgctggcggacactgttaaccaataaccaccacgttatggcattattgtgcaccccacttatcacctatcacctatcacctatcacctatcactctcgctttctctttttaaatcatatgatatctttttatttttatttttcatgttctcacttcatttgcattctattcttgctcgcagttaacgaagctcaaagatgggcttgcaatgggcctagcattcaaccatgctgtcttggacggtactgccacctggcaattcatgacctcatgggccgagatctgcagcggttcaccctccacgtcagcaccacccttcctggaccgaaccaaggcccggaacacacgcgtgaaattggacctctcgcttcctgagcccaacggcccaccaacttccaacggtgaggcaaagcccgcgccagcacttagggaaaagatcttcaaattctccgagtcagccatcgacaagatcaagtcaacggtcaacgagaaccctccatccgatggctcaaaaccattctcaacatttcaggctctttcctcccacgtttggcgccatgtaagccatgcacgtaacttgaagccagaggactacacggtgttcactgtcttcgccgattgtcggaagcgggtggacccaccaatgccggagaattatttcggaaacctaattcaagctatttttaccgttacagcggttgggctattagccgcccatccgccacaatttggggcttcattgatccagaaagccattgaagcccacaatgctaaggcaattgatgaacgtaacaaggagtgggagagtacacccaaaatttttcaattcaaagatgctggggtgaattgtgtggctgttggaagctccccaaggtttaaggtttatgacattgattttgggtgggggaagccagagaatgtgaggagtggaactaataacaagtttgatgggatgatttatttgtacccggggaagagtggagggaggagcattgatgtggaactaacattggagcctgaggctatggagaggttggagcaagacaaggattttcttttggaagcatgaaattgctagggtaagtgcaataaaattaaaaaaaaaaagtggctagaaaagtacgtggagcaaatttggaagtagtactactcagattgttgaaggggtcgacttcaatgtccaattatgaattctgatgtgattcatgcatgcaatttaatttaaggtcgtgctgtcttaggattttatatgttttgtacgtggttctacgcttgattgattttgaacctactaatgtttgttcaattatctacggtcaatgattgtagttcacgatcgatcgacaagtgaaatgagttattaatgtgagttttaattatagtaatatataagttatatatttataaaaaaagagaaattatattattattattaaattatatatatatatatatatatatatatgtatgtatgtatgtataacacacacaaaagtaattatttgaaaaagaaaagataacaggaaaataactaaagggaagcaaatggattcttttaatgtcagtttggaacagtgacagaggaaaaaaaaaatcgttctcccgtttggttaattgaaaagaagaaaagcattcaaaaaaaaaaatggattttctctcattatggagagaaaagaagcacaaacaacatttttttaataaaaatactaaattatctttattactttacatttttttattagaagtatttatgcaattttatatacatatttttttttctttctttctaccttttattcaatcaaatatatgaacatttttttttcattttctcttaccaaacaatctaaaaatcatctcatttttttccacttttttagaaaatcaaacaatgccttactgacaactggaaggaacatttcaataaagtatatatatacaaatatcaattcatattgagttgttaaagaaaatcgatgagaaaaagaggatcaaatcacttgtcctcttttctctctctctagtaaataaaaaataaatgattaaaatatgtttctttttatctctataaatgttaaaatatttgaaatttgtctttgtaaaaattttgatatattttttgttcttgcaaaattaaaatatattattttttgacatggaactagatttgattatatccaaacttatgtggttgatgattatacaaataagtcaatccagttagacactgacacatgtcaatgctccaaccctatctctctcccttctccatctcttttcctctttcttgttcgtttcttctctcttgcattggtgccgccaccacctcctctttcttcaccaacaacagaaacacaaacacaaacatacaacacgcacacttaaaaaacacaaacaagaaaaaaaaaatcaaatcgcaagcacgcttgacgattcccatgatcttagatctggaattgaaatagtgatgcatgacgatcaattgttgtggctccccatgtgacgaacaagggaggccattcgtgcgttgtccaatctgaactaagcttcttttgttatgaaatcggcaacgacaaagataattgttgatgatgctgttgagggaggcattgcacgttatagaagctggcaagattatcaaacttgagaatttacgtaaactcgtgagagtttcataaattcgactcatagactcgtacgagtccacttcatataaaaataataacaaaatatttataagtaacatatcaattaaatatttcaacaatataataaaataatatagcaaatcataaatttgtagatgttatagtattgatagatcattctcatcgagggtttgatgctattagagaacaaggatatgatgttattaaaggtgataattttttttatttgggaacaccatactaaatgaaagtatgttaaagactaaatgaacaaaaaataatccaaaatgatatatattttggtataatttttttaatttgttaactcgttgactcgatggtaaactcaagagtctacaaagtttacttagagtttgtaaagtttacacacgagtcaactcgcaaaggataagtagatttctaaactcctaagagttaacgaattaactcgagagtttgataaccatgaaagctgatgctccgatggatgtctgtggtgaccgttagggtggtggttttagagccgaaactggtgctctgcttgatgtttggaatggtgaagttttacattggttataaatataacaaatgtaaaattacattttctaccttggttacatgaataaccgatgtagaaaagcatacacttatcgaacctatctttggataaaaaataacattttaatcttacaagaataaaaaatactccaaaaattttatagaaagaaattctaaatattttgatatttataagaattaaatgtgtttcttcaattggggcaaaggatattgaattggtgcatccatcatgcatatatgcctttaatatactgagatacggagactatggacaatgcttctatacacatacatttgtacgtagtaggtaagcaataatgggacacagaattcaccgagatgtcccagaattcaccgacagagtgagagttcaaggcaactgcgtgtagtgattaacatgggcacatctgcacttgtacaggttctatctctagggtcgttcgttttcttgtcaagggagaaattcttgattatgtaaccaaactaggtgtcattttatccaaagtgggttggttgtaatagaagttggctatgattccacacgagttttacttgtaatatgttagggattctcaaccttggcattattactcgaagcagagttctgcctaactattgtaagggttagtctcgcagttaattatacttgtgaatatatctagacatgaaaaacaaaaaagggaaaaacttgacatcatttataagtaatttaccaatgtggtggtattttggagatcatttatgatattgggtgaacttgcaggtatgatctgttgaaagtgataatttctacatgaccgctaaggcctccttagggacgtatctacattcctcccttttatgtacacgcatatctttttagtatgaatacgttaattaatacattaagattaaagattatcttaaaatatattaataatgtaatttgctaacgtgctcacacataagttagccatggatcaatgtgtataactgctctcatgggaatccagatcttgcgagtttggcaatttacattgatcaagatctcctacatttcaaatttaaaaacttaatagaagttggaagcattgaagccatctagaatattgggtcgtgtggggcgtattctagtgaagaaaaatttgggaaacagcaaacaactaggtgcatgaatatagggaagagaataatagaaaaaacaaagcataggaacaaaggaaaatttgcctctcaattcccacgaaagcacgtgctaagtgagtctcacattgccaccagctttgctttaactggtgcttccaacggtggcaccaaaccccttgccaaatctaagctgtcacaaacttcgtgtttggaaaccccatcagaaagggatgcatttcattcatatccaacatagaagttataactactaacttctgatcaaacatgtaaaattgcatccccaccaaacacgctaaaaatactactaaaagactgaatgaaattatcccacatcatgttcatgtacaaccaacatatatttcaaggattccctttttaacaagataaacaaagcaaagacatcaacagcataacatcacatatcttacaagttaaattacatcattaatgggaaagacaaacattaccaacaaatagtagctcaaactatttcaagaaagtaaaatgcagaagaggtcatggcaagagcttattaaatattgtgtggttaaagtgcaaatgtgcaacaaatcaatttgccacccttccatgtaaaatatatgataaatatagagattataggaaatacttctctatcttgttgacaagcaaatgaaaagttacgtctcatatttaacatcaatatttcagattgcttgctagtctgtttcaaattttaattaagaaaaatagaaataaaattcttacctgattccgttcataaagcatatggtttttttgtgaagtccttaatttatgtatgccgtcctttagtaagtaaactttgatcaattgggccaatgatcccaatcacccgagcaagtaatatgttgcaactggggaatcattttggaagaggacctatatcatgcatgcatggttgagtgaggaaatttgatataaatctttacatgctaaagtttgaaaaacttcataccattttgaaacaaataaatgacctttacctcacatctgctatagcttttaaccaaaatattctccggcttcaagtcacaatgtattatatcaggagatataatttattttgagttggatggttaagaggggacaaaaaagagaaaagattgcaggttaatttcgattttttctacaaacaaaaattaacattttaacaaattaacatttgtaaataaataaataaaaagacaatgtattatattagtccaagactgtgcttccaaacactgaatggtaattgactgcacacataagttgaaaagtgtttataattaatgacagtattagaatagcataaaagataaaaactaaagatcacagtacaaacagaataccataaaacctgcaacctaggcatcgagaaatacacttccccccctgattctcggttaattttgtgaatctcacataagttgcctttaagtggtgcacattatggagaaagtgatattagcatccaaaataaactatatataataatgtatagatcgacgtagaatcttgatagcagtggggaaaataagtacccagaaagataaaaaaaaaaaaaagttttatgactcgtgccattcacgagaggaatattatactaattgatatgactcgtctcatatatttttctttatgacaaacccttgatattttttattttattcgttttacaactaataagcaaaactattttaaatatttttttcagaacttaatttgatcattattgttaattaaaaattttagatataaagagtataatttttaaataaaaattatagataaaaaaacgtaagaataaacttactacattctgattatcgcacatatgtcctatattttttttattactttaaagaataataatgagtaaaactataattgttaatttgactaaagcaaactataattgttaatttgactcaaacaaactatagttgttaattgcataaagagtatagttttatataattaattttaaaaaaaataaattactgtggactgagcagtttttatgttgttttattgctgttaaatactgttgctggatagtggggtggtcgattatacgttttagggactgggcatgatagcttttttgctttattattctccaaattctgagtcgggaggcactagctgattgaaatgctttaactatgtactttgctcttttattttcactccttatttttgtctttattgtttattaatatacatacattatcttaaccttaaaaaaaaaataatggatctacaatgcagttgttgctaactggtttgtcatatctcatttgtattacaattaaaatcctcagttgggcaagcaatttattaatttgcataggttatcatggctattgcatcttgagcttctattccattatatgtgcaagggtgtttacccggtgattgacgacttagcaaatagtatggatggttgcattaagtgtaaaaaggtaatgataaaccagtgttgtgtaaggcttacaacaaaaacatgataaatgaaaagaaaaaagaatactgaaatttgagttatttgagttgagactaaattaccacccttgtttgtttggctcattttatttggttctttgattttcaattctagagtgtattttctgaagccttttatggtgactttttaagattcacattaatggtagaattatttgtactttttgtttgcaatataaatataaattctctcataatccagattcaataaaaaaaaaattgtaattaactcaccgctctgttttgtggaacattttcatatttttacgtattcattgattatttgagcttattgttttgaagaggtaggcactaaattggttagtgcatttcttacagtatgctaaacttggaatggtttcttattgtctagatagtaaatgttccttagaaaggagctacgaattaagcatccaaggggtaacattcatgtatgttgttttggaaggataacatttcttgtcatttcttttcttttcttggtgaactcgtgatatttttagtcgagaatcaagaattaattctttaagatattgaaatatattttagagtgtgattagtgatggtcctgagcacagtaaagctaagtgacattcattgtctcattttttaggacatcaaaattttatttagtctatataaatattaaaatatttttttatattatgaatgtcaatgtggacttcaagaattgtttctttcaattcaattgtggaattcaaagaatgatgagttgtaaatataaaagaaaacaataaaaattgaaattctctaaaacatgatgattcttatgatttggtagtaaaattttatttgaagaattaaaagttattaaattctttgaagacattaaattgctttcctaatacatatataaactcatagaataatattaattattcatgttatcgatgtaaatctttactaaaaaaaagtttattaaaattgaaaatattaaaatcatatttgtaatatactatttcacatgttagactaaaaacttttgttctgatttttttttatcgaaaatgatttttttaaaaatcttgatgatgaattttgcaacaaaaaatacaagaaggacaatatctaaattattatcatggcataattttttttgttcactcacgtaccaaaaatcttagaactgactctgggcatgatcttttatattaggtattttttagtatgcataaacctaagatcaaatccttcactatatgtttaaggatcaatttatcggttaatcttttcacgcaattttgttatcctaattttcttatgcaattcaattcccacccaacacaaaatccactcatacctacttctcaatttgcatatatcttttcttgcctgggcacctctttcattgtcaaatccatcactcatttgtaaaatcaagtttgtgatttttgctcttcccacgtgaaccctttattttgtgacaaaaacaagcaattttgctattagtccaaagtcagcttgaaagttgaaatagaactcagaaagtaataattgtatctatttgtgttttataggctccttttttgttatttcttatttacgtttttatggatcggtctggctggcctgttattggcccaaagtttacaaaccaaaaagtaaagcaagattatggatcggtctggctggcctgttattggcccaaagtttacaaaccaaaaagtaatgcaagaacacgtgtttttgcttcttgcacctccaagttacttcctgaatcttttttggaatatttcttttccttttcggattcatcatttcataagtcaaaatctgtaatcaattcaaaatctaaaattacatttaggattgatcattctcgaaaccaaaaaagtggtgcaaaaagtaactggaggtgtagaaaacaacagccaagatggttactgttaggcccaattcgtaataaataatacgattattaaaaaaaaaaaaaatctaatgcacgtgtatccttcaacaaaggtaattattttattcagagttttcttgtcttcaccttgtttaaggaaaagaactcacttttataaagactaaattaaacatccacaaaataaatagtagctaaatatatcgaatttgagttttaaacttaaaagttgtcttaaacttatttaagttaaagaccagcatattttgacatttaatttaatctcagagactcactaaagataaaatatattttatcttaaaaaatacttaataaaaatatttataaatttgaattcacgttctcgtgaaatataaatcatatccttaccaacttgatcaaactctgagatgatgtataatgaaaaaaaatgtgcctctagcacttatctgctaccatattttcaattgtgacctaaaagccaacttgttatttaataatttgctcctttgaagttgatatttcattttgatcatgctgcatgattcgtgcaatcattcattctaatatcaacaaaccagaatcttatctggatacaactattgatttgttttccaagcatacgttaaatctgctagttgttgtcaataactctttggatgcgattttactccaaggtcaaagacaggaaaatcaaggtgtgaccagcattggcgcactaagctagctcatgaaatccaaatacaaacaaagttttttatttttttattttaagagtaaattatcctcctctttctaaataataatattcaagttattctctttttattaatttaaaaaccacatttttcttacttgaattgaagaaagatgagactttttgtgtgattttagtttggatcccctagcggaaaagttatgatatttgatgtaataaatggtgtatttattatcggatcaagttattatattataacattaatatgcaccgcatgacaataaatgtagcttcttattctactttatttcatgaaatacggcacaggcttattgtagggaagcaaaagacaacgcggagaggtgcacgttatttaacctttcgatctgtagccaaaacatgaatcaaaaatatcaacttctccctgaaagagaattagaaaaagaatgaaaatagaaagaaaataaataatataataaaaagtgagatgaaaatgatcgagctagaagagaatttatatatatatatatatatatatatatatatatttataattacttgttgattttttcaactcaaaaccctcagcttattctttatatataaatatttgaggttttgtgatgaattttgagatataaaaaaaattctaaaatcttagaaataatgattttagtagaaacttgattaaaaaaaattaaaggactttataagatatatgagattagagtttagaaaggagaaatcttgagatttttttccgtaaatttttatgcttttaatgggtgaattttgaataaaagacaatttaaccaattcaaaatgtaactattttaaataaattaaataagcatttgagagtttgaaattagtaagaagatcgaaattggttagctttaaaattagagtgatttaattatagctcatgaaaaacttggaggactaaaagtaaaataattcaaactagaaaggtcaaaaggatatgattaaacctttgaaattttaaaagatgaaatggagttttgaacacgtttttattagtttataacttcattcaaaattattatctcatcttctgaagttctataattccaataacgattaaattaaccgaccatgatgttgatgtcaatgaggaaagaaatgtctacaatttgtttatattaaaatagactaaaatataaaatatattttccttaaaagaggagagtaatttaaaaaattaaaagagaaaatacttatacaatagtttaaataagggttaattaagtttttaattcctctattttttttatattataattcttggtttcttaaaatatttttagtaacttttaattttttattaatttttcatcatcatttttagtcttttttaaaaaaattgcttatttttaatccctcatctttttttctcaaaagtagtctttaagtataaaataaatgagtgattaaaaattaataaaacaaagaataatcttgagcaacaaaaataaataagagattaaaaatagacaaaaaaattaaaaaaactaaaattgttaaaaaaaattaacgaaaaactaaaaatcgactaaaaatttcaaggaactacaaattgaaagttttttaagggactaaaaacttaattaaccatttaaataactaaagaatataatttgtcctatcatcttataattttcttataccgattggtgattgtgttctccttttttttccttagcatatgcacatcaaacagaatgattcaaccaattagaccgacagtctaatattttatccaatccaacttaaataaaattttgtcttacgtagcatatttataatttgatataaaaaacaaatttgataatctttcttaaagaaaaaaaaaaggatggaaaattaagccacataatttctggcagtggctttgatgaaagatttcgtaccatctatcattttcttactaaattaaacctctaaaatttaattctatatatgtgtacgtgtgtgtacgtgcacctttattgtatctataaattcagtttgttggatctaagagcgtcacataaattttgaaaacaaaacaagagaggaaatttgccaatactttattatggacagagttgccagatcctgctaattaaatagttttggacccttcattaaaaaggctacttgatatccagctttaaagataagctgttttcaaacaagtatgagtggtgcattttatccttaaaggacagcaaaaagagcctacataaaggagaatcatcatcacttagacaaatctccacggccaaaattttctttttataaaaaaatctttaataaaaatttaagtgaattggatctcactgattcattaagacataacaaattttaagattcaaactgtgtgcatatacaagtatttataaattattcatcaataaaattctaatatcaaaaatagaatttgaattcatgtttttatgtgacatgaacttatttaaatattgtgtttattcaagtatttatagattatcatccacataattttgacattgataatgagattcaaacttatattcttattatcaaatatgagtttgatcttttatggaacaattttggttgataatttttttttttttttgtgtgtgtggtataatattaaaatgtgtagatgaaccaccacctacttgttaaattggaacatgtggtgtgctggcttagcttttgactggtagggccatggccacacaaagccatcccatatgagggtcatgttgtgtcaaatatcaggtagttctacctcctaatggacccaccaatctttgaattagctaagtgaataaagttggtctcttttttcccctccctttcttctctttggtattcatatcattgaaagtgaatctatatagtcaaacaaataatttaaaacttgatatagcccaagcccatcctgagggttgtatagagaataataggaaatatgcttaaaagattttgaaagtaacattggttgaaaaaaaaaaagggagggggggaggaatgacattgaaggtctttgggtctatgatagataaaaggatgagaataaggttaatattatctttgaaatgatgctttatctccttcactattagcatttgccataaagaatgaaaaatacaaggaaccattttttaatttaaaaacgttatttccatgagtaagcgtagtttcatatgattattaatgaatttgagataaagaaatagataagtattaagcattaaagttgctctaaaaaaattacagcctatttttttataaaaaaaatattttcatattaaattaaaaaaggcacatataattaattaactaaaatagaaggtaaggaaaattagaatttaattctggtcagtgaaattttttttacactaggtataactttaaagcaattattgtgatttactattaaataattattgtaaaatagaaaggccaaaaaataaatatataatcagttatttaaattcaaaagggtgtatacttattaattagggggaagagaaataagaaagaaaaaactataaatataatgagttatatgatattactttttacaaaaaaattatttttaccaccataatctatataaaaaatctgattaaccactaaaagtattgagttagtataactcaaatcaattacttcgttagttttaaaaaagaatatagataaagtataaagaattattggattgttatatatatccacttaactatgcccagtggtgtgaaaaagtgaaaaatccttgtgagccattcacatataaagtagatgaatcacactgaagttgacgttaaaagaacaatcttttgggtatttcttttttaatcttttctgttcggttagtggttagctgagtatctttgagctaatcatccacatctaagaataattataggttcaattatgtagcattcaaccttttgatgtcgcggacatggttaaaaagtggagttaagttaataaaagtagctttttgctagtgttttagaaaagatagagaataagggcaatagaaaaaagagggtgttaggatatcaatatcaatgtggagtgaaggataatgtgagtaattgagtgaaggggaaccaaccgaggaagtctaaaaaagagagagatgctttaagggaatgtcacaatctctctctctctctctttttcacacatacacacacgagggcaatgcacgaaaacccattcacatatgtcaccaaaatgctagtggattccgcacacgtgcacgccaactttcacaatagggttggagcttctctaatctttatgtttcttttttctttttaattcacaaccacatcatttctgtaatttgaatatagataacattacttctgtcacttaataaataaaatagtattctttatataagtttaaattatttttttctctaatttatttttaacatttgatttcatcctttatttttctttgttcaatttgattatctaatttttaaaactagttcaatttgatcttgtcatctaaattaatttaaatattcatgttatctaaatttgattttgttgtctaaatgtgtgttttgtggtgatttaaaatcaccactaagtggttttaaacaattataaagtgtgatttcttaataccattggttcaatttaaattataggttcaaattgaataaaaaaattaaaagatgaaatcaaatctaaaaatataaatcaaaagaacaataaattaatttaaccttcatataatccttttcatacattaattatgaaattgatggattgaattgatgtattttatttttaagaaattaaaatagtgttcacctcaatttagacttaattacctcttgtggagaggttaggatgaacagagactagtggaaatgaatatataagaaatgtgagggcaaaagtaaaaacaattcatgatctcaatttagacttaattacccctcttattaattattattacaagtaaggttataataagtcttgaagaaataatagaagtttggaacatagttatttagacaaattaaaatgatatttttcttattggataagacaattatgtacctaagggttgtctatggtgattgttcatggataattgactttgggccatcttttcatgtgagctcataattcttctcagacttctcaaattcttttcaaatcacgtcacaagtaaagattgttggccgaagcgaagagcatctaagggggttgttgataaggtggtttttttttaacgtaaaaagtttaatgtattgtaacttttaatcaaataatgaaaaaatctcaaaatttcaagtgtgacttcaggattggtcataggtcgtgttgatgatccaaagagtataaattctattacacttttatctaaccttattttttaaaatatatattgaattgtttgcttatgtattctctagtatttatttttaaatcaactcaattcgagttttaaagaattatattgttcaaaatttaattaatggattttgttgttgcaaagtgaatgtaacaagtttcttagaataaagaaaataacacttgtaatgctcggaagagaagagagagaagaatatcaaagagatatatctcttatgacaaatatcattggaaaaataataacattgtatttttatccttttacatattagagggttttttttttttttttgaattaggctttggaatttttctttctcacattgagatatttttcatgttaacgtttcactgtattttttaatttcttattttacatctccgaatccatttaatttccaatttatgtcacacgcaaagaaaaatttcttgattgtactatatcatcgtttgaaataatccaataatcttagataatcctaccttttcccaataatattagtcaattggtgatggttatcttgcaaaatatatatatatatatatatatatatatatatatatatatatatatatatatatatatatatatatatttgtaagcctgttggtgtatcttgtctcatacatctcgtgcgggcaaatagaaataaaattcttttttggcttttaaaaaaatattattaggagggtgcgatagtaacagtgataatgaaaatgtgtatagagataatagtaataataaaaaggatgacggacaaatgtaagaagtttatatttttttaaaattaaaaatcaaatttataaaatctttttttgaaaacaaatgtaaaaccattttgaaaatgaattaaaaattattccaattctattttaacaaactcattttattttcaaaattacattttatttccatgtcgtcaaatattgtaacccacattcatctctagtaatttgacaacaatagcatcctacattgaatgacaaaactcatgagacacaatcatccaagtggaccttcgatagtaaatggttgtcatcctcatattccatgagaaataaatatggagccaataaatctatcaactcttttataaacattaatatgttgttccgaaggattttgttccaaaaagaaaataataggaggtggtggtgccacaattatatatcactaccttattcgatggttcactaggtgaagaccgtagctctatcaccattgtagaacaaaatgaaatactatcattttatcgatgttttaaaactcttgactgaactgattggttgaattggtttaattgaaaatcaaacttatgatcgatccgattaactttttatatcagaattgcgtatgactcgctcgattcggcttcaaactaggcaaaatcgatcactcaactagatttggagttaacaaaatgtcttcctcttcacatgttgcatcatccaaaaaaaaagttttctttacactatccaatgtgcacactcaactggcatagtttactatgcaatttcattggttgaattttcatatgctcaaagtgataaaattttcatgcgcagtgagtgatcgtgttgaaatttgaaatgaggaaagtacattttaaatttgaaaataggaaacaaattgacacgagagaatgtttaaatccatgtttatgaagtatgtaaaaggtttttaatcattttcaaataatcatattaattcaaccgtaagtgagaaaacttattcatataaaatgcctatcatataaaattaatatatttaatgtatactggttcatatgattcaagtagtgacttgctatcttcgtagagggtgccagtcatttctcctcagattggctgataagagagtatttgactttttatgaagttgaggctgaaatgttgtatgattttctatattcttagttgtacgtgaaaccttttatgtttactagtaaaggttcgtgtaaaggttattgtgttttgaagtatgactggattggttttaaagtactacttgtaagattacaatttgtattgcatgttttccatcaaactaattaaacatgtcttatgtttagtttattttttaaagaaatcttactttagctttttaaaaattaaaaaaactagtgacttggctatcccaactgaatcaataactagtttgattctaaaaaatattgttaattattttaatactgaactagatttcattcatttacttgatattggattgttgatgaccaagaagagacataaatcacatgtcattagttgacaatcgttaaatatgtcagttaattaatactattaacttacacatgaatcttgatcgattgttttgcagcacctttattctttacttatgtcgtgtattgcaaatcgtactgaacaaataataacatgtaaggttactcatatgttagcaaatttagacaaattaaagataataaggtttttgaccaaaaaaaaaacatcatgattgaatcaaatgctaggatcacaaaatcagtcatatatatcagaatgaaacatattattacaaaacaacatttcttaaatggtggggcctaatgatagaattgaagcaagatcattataatcttcattcaactctgatgtgacatggataacctaactaggataagattttgcaaccccaaggtgtataattcacaagataataaatatacttgcaacagtgagattatttatttgaaaagcaaataatgcatagttatagttatagctacttgtataaatattaaaacttgcattaattgtcaaattgtaattaataaaaagagttaagcagaaattaaaatctattaccataactgtaattattattattattattattattattattattattattattattattattattattattattattatttctttcacaactccataactttaaattgccataaattggcatctctgaacgttttgcataaatgataatttgacaattttaagttaaaaacggaatatattgtaatttcacaaacatgaaacatgttagtgttggtaggtttgctttctacaaacacttagacaaaggaatcatctttaaattttaatttttgattctttcatttgtcttaatccaatgcctatgcttaaaagaatacaataaaatgttgtaatatgagagacaaacaaatctaaatatttatcccttattagtaaactaattttttttaaagactgtttactttcaaatatatatatatatatatatatatatatatatatatataacatttttctgatgattgcattatagatgtacaatgtttattaactttgtcgataattcttaattaattaaaaaatctaactaactttattttcttccgcaatcatgttttttcattccgaaaatttaaacataaaactttactttttaagacatccgaattcaatttcatattacatccatttcaaaaaatttcttcaattaaaggtgtattagtatgcgagaaatatttaccacaatcctacattcacaccatattattctttgattgttttttttacagaatattctttaaattaatcattgaagaaaataattctaaaaacatatatactatcggttaaattaatttttaaataattcaaaatgtattataagtctctctatctctatattatttatcaaattaaccctaatgttaaaattttaaaagcaaagcaaagaagtgtatatttgaaaattaattcaaacaataaaatccatccaaatttttttttaaattacattatttaaaaactaatacaacccaacattatattttacagaagtttgaatttcacaacgtttgtctctctctctctcaaacttggctgttattacttattagatcatgactgagtcagatgcagtcaacaaataatctgaatacacagtctactgaattaatgctcctgattctcctgatcagaaaagttccaccggaagcatgtggtcctggccacacaatgactgtcacaagtgtcacgtgaatgctcagaaaaaagcaacaacataaaacaacaagaacaaccgagtgcagtgaatcacgtgtgtctcacaccacccttaatagccgcatcatttcatgcatgcctttttcactgagtggcacaaaagggtaatttccactcaaaggaaaaggttagttctgtaaattcaaacccccattcacgtttcacaggctgcgctgtcatcattattatttttatccctaacttgctcctgctagatcttaattattaaggaatcttagttgcatgaaacgtatcatgtgataatagttagttattaatgtttagtactacaaattcttaaatctcctcatttcaacttccacttgtcgcggagattaagatctaattaatataatactatagccacgtgaagatgtgaaactacaagtggcttaaacctaaacaaatgatttttttttttttttctgtagttttcaatcttccattgttataagaatttcaaagtttgagcaagcaatccatttccatttatatctatatatataaatataaaagagaatatttcttgttagtgagttggcaagagtaaattacaaataaatggaattgttaaaagttagtgaaagatggagatattcaaaccaatttgagtatgccctacatcccaaattaacttgattctgttgcggttcacaaaaattaactattcgttttgggacatgaagaaaaataattaacgttttacgtactttgggaatgtctcagttatgatagacaagttcaaacaaaaataataaaatacttaatattactactaagttgaagggtttgaaacttgaaagacaaatttttctgtatggatcaaagagctatcttaaaaatttatagtgtaaggtgtaaggaaatgattttatattaaaaagactccattgactaaattttatagttttacacaaattcacttttattttttgatttaagtgcttttatgtttactgatgttttgataggctctacatcttttggaatctgaaatctttatttttatttgatataaatgaatataattaataaaataggactacaatgatttaaacatatattgtaattataatgtgaaaatttatgaatgtttaaaatctttgatattgcgagaaaaaatgaatcatatattagataatgatgtaattttttttaaaattcattaatatattttccgactcaatgtttaaataactaattctatcttatttatgaaactttgttcattcactttttattgatacatattaaccctcaatctatatggttatctacatataatcgcttttaataatgctcttttcagagataggataagatgataactggtcatgcatacgtatgaattcaacttagcaatgctatatctatcttccatataaaaaaaaaaaaaaactatatctatcctacagctcataattctgtataggaaaatgatgttattaatgaacaactctagccatgtgtttacatccttagaaaaaagcagaaaaaaagataaaaattgacaagtgacgcaatgaaaataaagagaaaaaatgaatatcaatttagcattttaccgcatattcaaatcaaactttcaacagttcaataaaagatttacctgatttttatgtataacataatttctttcaatttagttatataacataacattatatatcattttattaatatactttttttttctgttttttttatgcagttatatataaaatgaaagagatcaaaataatgtaaaaaataaaataaaatattagatacagttttattaaactttgataaataaaactgtaatttgttttatgcaaaattctcatcagttttaatttatattcctttttaatttccacaaatatccttcaaagccaatccattgtatactacaaacgtattacgtatgcaatcaaataaagtattctagaattccagaaaaaatgaaatgaaatattctaaaatactaaaaagctttcctttattacgtaattcaccaaataaaatatttgaaaaatattcaactcttacacgtcaaaatattaaaaaaaatctacttataaatatggtcaacaaataagtatataaaatcatcaaccttacaaattttcatatttcaaaaaaattaatcttcgatcaaacaaacttaagatatcctgatgaacacctaaaaaacttaaaaaaattcttacttttacaaaacaatattataatttcccacatcataatttttatacaagtgcgacattaaaatttatttattttttactatgattcatactatacaaaattcttaactcgacactttaatttctttcatttgaatacaatgctattaatatagaatattcatttttaataagatttttttaaatatttttttatctacaagcttaaactagatctttttaaataaaatttaaaaagataaagtccaatggattaactatttgttatttaaggattttcagatttgaacactagtcatattctctcccaaaaagcaagtaaataataataatttatcaaaaaagtctagtttaattgaggatgggtgagttttgtaaattttttaatatcataatttattcttaataataataattagataagtgaggtggcaatagtttggcgcaaaaatggaggtaaccggaggatatagactgcaggggaagtgaaccaagacacaaacataacacaagaagagagagaaagaaagaatgaatgaataaataatcatgcactctctttctattcttcttctttctatcataacataactatgatatcaacaccatataataattaatagcaataatttagtaatactctcttcattgtcaattccatcttcacttcacttcacttctctgttctgttgaatattcaatcattcgcaaaacgcatacttttctcttcattctcagcttttttctttcatttttaattctccgttttccaaatccatgattgcatctcgccgctgcgaaaccgttccgccaccgtcgattcccgatctccggtgacccgaaaatgctccctttcgcgcatccgaatcccaccatgggaagccgcaacaacaacaacaacaacgccaccgccgagacggttttcgccgccgccaacgccatcgtcgccgccgaatccagagtccaacccaccgacgcgccggtgagtttctctctcctccttttctctctcttgtttgtgtctgtgtacgtgcgcctgattcctcgcttttttttccttttcgattttcaaaattcgatgccgttttggttaccgagaaaagaaaacaacgtgcgaaaggagtaggatcttgtgttctgtgtttgctgtttcgtgttttgtattttgtgtttttatgtttctctctttttctgttttttttggttaatttttttgttttgttttttttttaaatttccatgatggtgaaggtctggtctagtcttttattattggactatatggtggtggcgttgaaaggtttgaaattgtgaatcgctttttctttttctgttttcgttttgttttgaacatctcaaactgtatcgtttgtggctttaaaaagtgtaaaaagaagggaacttagtagtgtggatcctggggtgtctccctttttttttttttttaatttatgaatttatgtttcgtaattaatcagagacaagggtttgcaagtgaagaagcaaaaacagccttgaatttttattttttgtttgcatagtttttactgttttctgccttctgtgtgtgctatgattaatttacctatctatcagaggtttaatatcattatttttagtacataatatttgtgttaattaactcttgagctatttaatctgcagtttagtgttctgcaattcaagttaatgtcctctttgtagtgcatggttaagtgagataccatcttttgggagatagttttgagttaacaacttgacatgatgatgatttcataaactttctttccttgcaaatgatgaaaattttggattaaattgagagcattgtgctttgagttcttctggcctgttatgtggttctaactctaatgcgaattaaaactgatgaattgatgattatattatcatggggactgacttcagttatctacacatactgtctacaatcggtccgacaaactgctatttttatcatgttgctgaccttcgattgtgcttttaataagctttccaggttttattatggctaggtgcttctgggttactcaaacttacgtttcaaaaacatatcaattcagttaatttgtgagaatttggtcattggtcaatgtctgaaattggcggcgctgtaaaacaaaattgtcctgccgagtagcgacaatggaatttagttctcattgaatgctatttgcaaataggatgagtttgaaaatagattgtggtggtaatgattgctccggcaatgcatttgggtgatattggtggtttttctccttctgttaaaggaaggaagtcatgcttttcgtgtcgctattcagcaatgattgttctgtcaatgtgattggctgatattggcggttttttcctccttctgttgaatgaatgaaatcatgctttttgtgtcgctattcggattctttatatgtctactagtgatgtttcttcatgcgatttttccatgtactataaaaaatgttatgcactcatttgaaatttaaatgtttgttgattcttttgatttgattgctgacatatatttttcatatctctggtgtaattagctatgtctgtcaaacagttgacagacatagaaaacttagacttttcttcttttctttgcaatgggtaggctgatgaatcagtctatatgctttagtagcaccctgtcctcgttagtggctattggaaattgaagactgctacaaaagattttttgaagaaagtcaatgtgtgtgtatgttgattagctatcagaaattagatgtgcttactatggaaactaaaattctaatggatattccatatctgtgtaatatcttttgttttggccacaccactcttttgtccttaaatattgaaccacgtataacttaaacctgagaattggataatgtgtaacaaaattgccaaaatgataatagtcacagatcacgatatttggtgctaatttagagaaattcagcactatttttggtatatcctaaaaattttctctgtaaatggattgatattgctagtgactgtgactaatgttttgattttgttacaacttctgatatataaattttttttcactaactgcagaaaaaacgttggggaggctgctggagccaatattggtgttttggatctcgtaagagcagtaaaagcagcaagcgaattggccatgccgtccttgttccagaacctgctgctccaacaggtccagctgctgctgctactgcagctgcaccaaatccttcaaccgccattgtaatgccgttcattgcccctccatcttctcctgcatcttttctccaatctgatccaccatctggtattcaatcaccacctggattactttcactctctgctcttgcggccaatgcttactcttctggtggtcctgcaaccatgttcaccattggtccatatgcctatgagacccagttagtttctccacctgtattttcagccttcacaactgaaccatccactgctccatatactcccccacctgaatctgtgcagcaaacgacaccttcgtcccctgacgttccatttgctcaattgttggcatcttcactggaccgggctcgcaagtgtaatgggcatcagaagtttccattatacaattatgaatttcatccttatcaacaatatcctggaagcccaggtggccagctcatatcacccggatcagcattttcaacttctggcacctcaaccccattccctgatagaccccctactcttgaattccccaaaggggaaacaccaaagatcttgggtgttgaacacttctccacccgaagatggggttctagactgggatctggatcattgacgccagacagtgcatggcaaggttcaagactaggttcgggatccttgactcctgatggtgttgggcttgcttcgcgattaggctctgggtgtgtgacacctgatggtctggggcaggaatccaggttaggttctggctgtttgacacctgacagtgctgggccaaccaatcaaaacaacatctctgtgcaaaaccagatttctaaggaagcaactcttgcagattcagacaatggacatccaagcaatgcaacattggttgatcacagagtttcatttgaattaaccggggaagatgttgcccggtgtcttgcaaataaaactggggtattgcttcgaaacatgtcagggtcttcacaaggtatactgaccaaagaccctgttgacagagaaagggtgcaaatagacaccaatagtagctgtaacgcgtgtacagagaaaactgacgataagcctgacaatcctgtaggaaaaggagagcaatgccttcacaagcaaaattctgtaaattcttccaaagaattcaattttgacaacaggaaaggtgatgtttctgttactactggcagtggctatgagtggtggactaacaggaaggttgctgggaaggaaggtagatcagccaacagctgggctttcttcccaatgttacagtcagaaatgaattgaggttttagtgtattgcaacatgacttaacctgtatggtataaaagcaaaaaggattttccatttctctgcagaacctttagtatactgaaatgtatatttgaatatttgaagaccttatcttgaatgctgctgttcatcatatacctttgaggaaattgtagtaaattgatgattggataagactcagatgaaccaacagttgttatattccttgaggacctaaagtagaatgcaaggggagcatagtggtagtaggtagggaccaatagtgggttatattatatttatataattgtgaaacattacttcttgcatttcatcctttcaaatatacagaaatagcaaagtacaggtatttcgtgttgtggattattgtatcatttcatatgcaataatgaaaaaaaattatattatttattctttttatttttattattctactttttggggggcaattggatttatagaaaacctgtacatttgatggggtcttagttgcatgcctctgcaattgttgcaaaggtggggtagtttcaaaaatgcatgtggtgcacataggtgggttccctatacagctatatgtttctacatgtttacctgtagttgtgccttctaattaatgcaatgcttcaatgggggagctgcacttcagctaccacaaacttcgtactcatctgccactaactgaggcatggtccccttgcatgaatgtgcagcagcagttcaaaggctgcaaccaagtcgttctggctcatcatatgctggctggttcagtttgattcctcatttcagttttcaacccaaaggaaaaataataataaaaatggaaaagaaagaaagaaaagtgatttgattttttcatatcagatggtggcagaagtgtatgtttgtcatatgaggggggacccttatagtgccatgcactatgttgtgtagtgtttgtcttagttgtttcttcttgtcttgttgtcttgctaagtccaccgattagttcccccattggacaaaatgtttcgctttcgggtccaacccccttcaatcataggtgggtgccttgcttcattcaaccacctgcaggatcaattttttctcttgatcttgtccataaaggcaaaagctttgtggattcacaaggcattggatataacctctagtggcagttaaaaactagttagatcatatgcagtagtatgtttctcaactgaaaaatagtgttgccataacctatttttaacctttgcctagattacagtaccttttgacacctttgcaaaatacccttttgaaaatacacataattgaataattttttagtaatataattataataaaataaataagtaattaacttgtatttagtaggttggaaataaattgaatactcgcttcaaataattatgtgtacataagtacttatagggttaacgtgtttttagtttcaattttttaaaaaacaaaattggttttagtttttgattttaaaacatcggtttcaatctctactttttgaaataaccaaactttgataataataataataataaaaataaaactttggatattttagaaaataaaagtacataaattattggttttaaaatttgaatttttttagaaactaacaatagcattaactcttatttatattacaaatttgttgaggttgaagtttttttttttccatgaaatttctttattcaaatttacacaattctttttaaggataggtttggttgacaataaaaaaaatgaaatttagaaggaattaaaaaaaagagaaagaggtgtgaaatcagtgaaatttctcctcaattcatctccttcccttcttagcaaccaaacctaccctaagtgttgtggtgcttccattcacctgatcttctcctaacaattacaactttggtttttcatctgggttgctccaaactcaattttgtgacatgtttgattaaactctaaggaggtgtgggatccacactttgagtgaaaattttccctcaattcatctcttttccttcttagccaccaaacctatggtgctttcattcacctgattcatgatctactactaacaattacagctacgtttggtttttcacttggggtgctccaaactcagtttggagagtaaactcaattttatgacatatttgattatcctgaaaagtgcgtcagcacattaaaattttatttgaaaacttatttttctagaagcaaaacttgggttgcttttacaaactcaatttacaatcttaattttaatccaaacacgccctacgttatttacataatttgtaattataattaagatattcagttgctctaaggtggggtttaatatgattgttgaacctgaatctggaattgcaactatttatttatttgtcattctcttatctcattctttcggacttttccttctctattcgtgggtgggccttgctggttccgttcacatcacaatactttgataggactgttaatttgggccggtccattttggtcaagtaagataacagatcagggtatatgaaattaggcaaaattgatatttttgaaaactagttttttctttttcacaccccacctttttttttacttttcaaacattagtttctgaaaaaaaaaagaggattcaaagagaaaagggtgcgaaaagaagttcctcaaactctgttgattcatccatagacttaggttttagttgtttaaaagttggatttctttttacgaattttaatacataaaatgaaaagaaaaaaatcataccattgaaaataaaagtattttaaaacacttttgattaaaccaagtgattaaacataagtaattaatatgttaaagttaaggtagaatgttcagacagtatctaaatttgatctttggtggaaccaattattgatcaagctttacttatttcctgattaaattttaaattagttagaatttcttttccctaatgaataggagagttaaagacaagacagaaaaactctcaattgaaattcaaacatacatctatagttgtttgtttttctcctttttggaacagtctttgtgcattagatcttgacccttattagtttaaaaaatgaaagttaagattaattttgtcttttcaactaagaataattttgtggtttgcatttaagttaggtgcaattattattattaattttaattaaattcaaataagatcgtttttattcatagaaatcgaatataatacaagaaaatttacaatattcatgcaatgggcttaatcaagttaactagactctcttgataaacaagaccaactctacactgttttaggaccggggtagagggatgttgttccaaacttcaagggtgaggatggagaaggaagatggtttatgttaaaagaaatggcgtaaaggaaaagcagtgttccaaactggtgttgtcaaagctaaaaggcaagttgcacccaaattatgtaggtacaaaatacacgcaaatagtagtattattattttttggtccttcctagtatctatcctcataatgagtgtgagactcattgcattggaagtaatgcctttcctaacaatgtgttattgcttgatgaaaaattcgtattggagaagttcttcaatttaatgcctctagtttgtttatcactccatatgttgatttattctaatggagagagaatatgattgagaaagggtaagacgcgtataaactcttgtggcgaaaaccaaagagagactaaacggaatatttatgtgtttagacagattaggagaatagattgagttgatctatacgcaacaacataattgagagatagaaaaatatttcaaaattattatttccccccagtaattgcaacatttccacaatttagttgtagtattaagtcatgcggtttaaaggtttaacaatattttaacatataattatcaaaatgtttaaaatattactatttttaaaatgttgctaattaattcactaattatttgcaacttctaaaaagattctttattattttgttacaggcgaaaaatgttgttaagttactttttttgtgacctttgaatatatagttgtttcttctaatgtttttaagacgaatcaaaacactccaaatcaagaaactcttacatggacatctagctagaaagatttcaaactgtacaagttattttccaaaagtaggaattctatcagccgcacaaagaaaatgttacgtacgaaggatattatgtactttagtattttattataggcaaaattacacttttggtcccttagtttatctctaatttcggagatttggtccccttaaaatttaattcacaaatttggtcctccagttttataaatccctgcaaaattggtcctgaaagcccgatttggacgttgaccattaacttcagacgttgactgccgtgtgtcaatgtcacgtgtgacttccaggtgtcaatgccatgtgtcaacatctgagtgatttcctataaatacttcattttttgtaggtaaaattgtatttttggtcccccagttttacttcaatttcgattttggtccccttataatttaattcacacatttggtcccccaattttataaatccttttataaattcagtcaaatttcattactggagaagttgtatttcaaatttcaaacaaaaataccattgtcatacataggccacttaaacagtcgtatacacataatattgcatgaaggagaaaaaaaaaagagagggttattacataatctgttaaagtaagagatctgaaaatttcaaacccaggttgggattcatgcaccactttcccaagttgaacaaccacagaagtgggagagagacaaagagtggtttttctctgggttccaagtgagtgaaaaacttgccatgaaaaagaagtgtaagatttatcaagacctaccatgtctctagcaccagtggctaaaccatttaaaagaccaattttgcaagaacaatttatagagagatttataaaaccggggaccaaatgtgtgaattaaactataggggaaccaaaattaaaattggagtaaaactgggagaccaaaagtgtaattttacctaaaaaaataaaacctttacagggaaccactcagacgttgacacatgacattgacacgtggcagtcaacgtctaagattaacgattaacgtttaaatcgaactttcaagaccaattttgcagaaatttataaaattgagaattaaatttgtgagttaaattataggaggatcaaatccgtaattagagataaagtaagagaccaattttacaattttaccttttattatatatgacaatatagttagtggcataagaaactgtactgtactgtaatttgaatagtattatccacaactaccatctgcaagctcataaacagaacctttcgtatggatatttaatagagctagctttcacctatatgaggaatatatcaatgttggttcatcaatttccttgtggcaataatttaacattaatttaatctacagtcaaagttggttatccaaagtctattatccttgtaactttattaaaaccaacaataggcccctccctagctagagcctaaattttttttcttctttaattagtttctcttcatactaatgttatatccttaccttgatcaaccttcaccagcacattgactaagagtaatatcatttcatttaattaataaaatcatatatgaatatacaaggtgttgaattcatcccaattcctatagatctgtacttctagcaaggcaatgggtctgaatgagtcatagactcagtagaaatgtactgaaagtcaaaggtgtgtggttgccgattgtactgaaagttgaaaagtataatttctattggtaatttttaccggctagaaatgtaaaagaaattgagggaatacaagtaaaatagagctaaaaaaaagactcgttgatatgataaatattagagaagagagaaattaaaaaaattgtggcttcacacttaaacatttttactcttagatgtaattaaatagactgaaaattgcatagcatatatgtttttttaggtgaagttataaagttgattttgtgactaagggagaaaaaagagaaaaaaatcatgtatttaatttctctcgttaacaaaattaataattaaaaactaaaatttactcataaaaaaacacatttcttggatagttttttaataagtaaatttatttgttttttttatttaatcaattagatctttaaaattggttttttcttctatttaatcaattaaatcaaaataatttaattacttaaattaaaaaaaatgattatttgacttaaaattctgctttatttttattttccccctttctttcctattctcttaaaccaaacattcctaatctttctattttatttcaatttttcaattattttcattcactctatttctctcttctcagtttttatttactccattttcacctatttcttttcttccaatttagatgcagtggaataatgtgaaaattgtacagtacacacgtttcatatcattaataattacttatcaataactgacaattgattatcaatcttttatacatgtaatcttttgttttttttatttaatagattaaataaaaacattcaattgtttttttatttaaccaattaaatcaaagatttaaccatgaaactccatttcaaaaatatatttttttctctttcctatttctcttaaacaaaatactcctattttacttttatttctcatttattttcattcattctatttttcttttctttatttttatccactctatttttcttatatttttttcttctttctatcatacaatctaggtgactatagatattatgaatattctctcgacactatttttcaaccatggcttacgatgaatatttagtattatgaatgataattaaaattcatgtaagaaaaattgtaattaaaacactactaatctacctacttatctagcatttgaacttcaatattctcccaaagaatatgtctcgtctagcatgatactcaaccctgatcggtgatgagtgatttttgagataagcctccctactgtcttttttttctttccattttttgacgatgttgtttaattcgattaccaaacaaataaataaatctaactactaataaaattaaaatttcatctaattagacaaagactccactagtaattgagctgactagggatccattccatagaataattactaagctcaaaatctacgcagttgaaatttacctaacgcatttactttaacatgtacatcactttttaatcaagttttctccttacgaaaatgataactttgtatatgcatggtcaaagttggatgcatgtattggacattttcatacacatgcagtatgaacgtgcaacctaaaattaatgtcctttgaaacaactttcctgttcaactttctttatatgcaaaaggtgcattaatgaccatggaaatttgcaagttctgttttctggggatatattgcataatgtatcctggggttttgtattgtgtaatggacacatgggagaagaaaatacgtagttgaaagtttttatcaaaaaaacatgcacatgcttgtttattttacttttaaattagtacgtattggctctcattacataaattatagctgaggctaaatatcgcaaatcgcaattcaaacttcatatattgcggtcaagtaaatgtttcctttaacattagttgggctgattaatgctacagtaacttttatcaaataacaatagcgtgtcaccctagctagggtattcaatcttctatcatcaaccgatgaagttaaattacaaaaaaaataaataaaaaaatcagtttctagtgaccattcgtgtcagtttatttaagtgacattatattaacaaagttagtatcaacatggtagtagatactaaattccacagttatgttactattttgttatagtgaagggtcaaagttgatgtcacatttctaatgttttctagcttgctgatactaagagaaaatttatatatttatctttaatttgaatcgatatcactgatacgtaggcttttttattggcttgtaaattggacacgtttccttcgaatccattctatagatttaacaaactagtgtgacgttcattgtatgtattttttctctctcgcttgtgattgagataggttgacgttgaatagagactcagttttgtcgacaaaactttgccatacgggttggaaaaacttggagtacaagatatcaagtttgaatttggttagggttgaaatttctcaagtttagacctacgttctttccaatccaagccattactgaaagtgattgcttctattttttttttctttatagaatctcatcataaagcaataaagtatagattttgatttttttatatagaaaatttaaagattttaattgaaaaaacataaaaggtacacaattttaaaaggctaggatttaaatttacataaaataaagttaaatacataaacacaattaatatggtgtttacataaatttatctacatgatttaaaaaatataattagtatatacaatctcatattttaagaataaatgtttagaattaataatccttttacgttataactacattttttgtaattaatctagtcaaatctagcgcctggaatttaattaatggccaaacaattgttttttcttgtactgtttaaactacttaagaagcattcatacacaattaattactcttttaacttcggaagtttttttatttaattattttttgggaatggtaatcaagctatctacttttacttctaagaataagatttccagaaatataatggtgagaatgacatttatgagtattttttaaatttttttttaactaagaactaatatttgttgatttttctttttttgtcaatggagtatagagtaagttaaaagaattatatatatatatatatatatatatatatatatatatatatatatatatatatatatatatatatatatatattctcacttcataacatcccttaagattgaagtcattctcttctgaaaatgttttatgcctggaaataatttttccaattttataacaacaaatatgagaaacacacattctctagccgtatatttatgaaaattatattaagatagctcgaaaccaacccctcttttgtatttgtaatagtcatcatatatgtttaagatacccaaatatagctgtgttgagtgctaattgattttttaatttttatattaatccatcagaatcagtttattaagaaaaagtacaaacagtttcaatcccatttcacaaaaatggaaatttgttccatcaagagtgtgactgagtgattccaaaaaagataagtatgatgcttatttgctacttttgtgtgagacaagcactgatagtatctcatttctttttctctatacaagacaaatcttcccgtatatgttaatactcttattggaaagacatgatttgtagttgttttgcatcgattcttgtctcttaaatcctttgttaacagcactggccactgaaaattgcatgcaccacttaaaagagaattctttgcactttctaattctctttttaattaacacatgcagttgcatttagaaaccatgtcatctttataacactcctttgtcacagctagccaatgtaatccttaaagactatactttttttcaacaaaactcataaggatttcgttaagaaattgtacttccaaaaacacttttatgctctagcaattgcacttttaatatactctttgtaaatgcatcattttgaaagttacatagaataatgatgatagtcctggattcacgtaactcacactagatcattttgtcagatagttctaacataattatcatggactttccccccagattacattatcatattttaaagctttgttaagttacgtaagaaagccaaagttagcaaaatatttactaaggttatcatcccctattaaatatcaattaaatacctaatttatatcaaatgtacaaattgtctttatgcttaacgcgtgattaaaaataccttcttatcaatcaataatttcatctaaaaaactatttaatatgtagtgacgcaatgccaaatcaagtacgtgtttgtatgcattttttattataaagttggtattatgtctaatatttatttatttaggatatcaaaaaattattttgtgcccacaaagtgatgacccacaagaggaaaaaaaatgatgaagtatttattgttccttaacagttcagtaaatgtagttgttgtttaagtcttttattctcaatgctatatatatgccagagctagggggtcatgttcctccatgtggctatgaggtgtctagagaacactgatcatgccgcaattcccatctaccattttcctaactgattaaaaaatatacatttttacatttctcaatctcaatcaagaaaaaaagagactttaatttctaaaagttgatagcttttcatgaagattgcatgaactccaattcagggacgacaacaaatcgatgaaaggttcattgtgttagacctcagcgcgtgatagattgtttctttttaaggtaattgagatttctctttgctagttttcttaattatatctttggtacgtgatgatttgcacgatgtactttcacatacaatttgattaaaattataacgatcaaccaaggctatggcctatgggcgtttgcatttagatgagattgcatgtcacttttttcaatgttaatgttggttcagttgaatgagtttgctacatatatatgctttaaatgctttccattgctgggttttgttttgtgtcttttataattcactaagaaaattatactcttctctgatccatgcccttgcaaagcctgtgtttgagcctgaagcagttgctcctccttctcctgcctcttaatcttgttcccaaggatctgtaatgagttttgcaattcatcaatttcatagtagcactacgtaccacatgataacaacctaatatcccttaatgacttattcctaaaattaaggtggattattaaaacttacacattggatatataaaagaaactcctaaaacaacttcaacaacttgacttattcagctaacaaagataataattactacttgtttgttttaagataattaccatccgatattattaattatgtacaaattgtctttacgtgtgattgtaaatactaccttcttatgggcagtaatttgatcttaaaaactatttaatatgtagtaattaatatggtcctgatgcgtacggggtcaaatcccacatatgcatatcacttttttgtttggtggacaatccttttctgggatatcttctggcgcctaagaactaattgagtaactacaacaggatgtaattgtttgccgttcggacttgtacaataatcttttaagtagatctctacggtagtgtaactactctgttacaataacaactcatagtaaaaacatattaaagggattattaaaatcataatagtccaaaagtatctctcatataataaataaaatcaaataaaagtgtctttagataagtaatatcttatctttaaaatatgaacatttatactaaatgagtactaaaatataacccaattaactagtcatatctgacattttattctgaagtactaaataagttaaagtaaatgtaactaaaaaaattatgtcttcaagtctcttcaattttagcattttttttcttgtgttttgaaaacaacatttataatgaaatgataaccacaatgaataaaacaagttataaataagagtttgcaaatagtattgttatcagctactgtggtaatttgaaaaataatcacaatatccacaataaatttcaaaaaatattatatatatatatatatatatatatatatatatatatatatatatatatatatatatatatacttaatagatattcaaattgaaaaaatcataatctattcccataaaatgatcatttaggtaagcatcacagacactcagtaattctcatgatcattatactctttggttttcagaaccaatgtggatttcatattattcaaagtatttatgagctcattatatctatgcaatgacatttcattgtctttcctatcatagattaagatatttaaaatctcttcctcattccagataaaggtatcaattatctcatcaccaccccagataaaggtatttcatatctcttctccatgagagataaatgtacctcatgcatattcattttttgaaataaaagatatatcgccactactttctaagaaatgatgaccaattcacacataattataaaataccattctagatcatttgtgttttgtgttatttttcatcttctatatcaattgaattaatgaaattttctcatattcttctttcttttcagtccttgagcaactcaccaatatcaaaaggtttttttttatgtgtgattttaagaaaatgaaccgtttatccttacacaaagattataatttgaaatttatttaaccgatctttctttatctattatttctattatcttaattattattttaaaaacaaattaatattttatattttttctcttcctattattatctttaaaccaattatctaataaattattatactaacatctcaaatattttcttttactaaaaagattaaataatcttatatttagataatttttatctaaataattaatggatggttttagaatattaaatgcagtcccaacatgttattcacatcttgcccaatgttattaagagtgtctttccattttatgtaaaaaaaagtagtaatatggtgtgatactgacgcaatgccaaatacagctacgtgcaagtatgaatttttaattataaagttcgtattatgtcctatattaattaattttacggtatcaaagaattattttgtacccataaagttatggcccacaagaaggaaaacaaaatggagtttatatcgctccacaacactttatttaataagttgtcgtttaagtctttcattctccatggcacgtaatgtgtgtatatatataagccagagggtgtcaggttcctccatgtggctacgaggtgtcttcagaacactgatcatgtcgcaattcacatctaccattttcctaactgattgaaatattttttttttatttctcaatctcaatccagaaaaaaagatactttaattcccaaaagtatatagctttttcatggagactgcatgaactccaattcagggacagcaaattcgtgaaaaggttcatatgttagacctcggcgcgtgatagattgttgctttttaaggtaattgagattgaaaatatgtgatgtgtgattctctctaatgccgtttctctttgctagttttcttatcctttgtaatgattggcacgatgtacttaacataaataaattgattaaaattaaaatgaaactaaggttatatatgaacgttcccatttgaaagtgttggtttagctgaatgagtttgctatatatgctttaaatgctttccatatgctatatatgagcgtttttatttttttattttttataactcactaagaaaattataatcttgcattattttgaaacagtaatgttatttggttggaaggattttcgtgaaaagtgtgagattttcaaaattaataaaatgttgttaagcatgaacatatataatcgctctacctgcttgatcagtgatcactaaactttattcacattattttttacagtcatatagtagtagattggataatcatgaagggaatctcacaagtttgaattttcacgcattcttactaaccagtcaattagctttttcatgttcaggaaatttcattctacaaatagcattgttattggcctagagttgtggagttttcagtctctgattgcaagttaggaactgattgttgcttcttttttttgaagtcacaagaatggcattagcaccggttccaaaacttgtccttggttcagttgcctttgcaatcttctgggtgttggcagttttccctgctgtgccttttcttcccattgggagaactgcagggtccctgctaggtgcaatgcttatggtcatattccgagttattagtccagatcaagcatatgaagcaattgatcttcccattcttggtcttctttttggcacaatggttgtcagtgtttaccttgaaagagctgacatgttcaaatacattgggaaattgctctcttggaaaagtagaggagcaaaagacttgctttgcagaatctgtgtgatttctgctgtctcgagtgcactcttcactaacgataccgcttgtgttgttttgacagaattcatattgaaaattgcaaagcagcataacctcccaccccatcctttactacttgcacttgctacaagttccaatattgggtctgctgcaactccaattggtaacccccaaaatctggttatagctgttcagggtagaatatcatttggacagtttctaattggtattcttccagctatgcttgttggggttgtagtgaatgctttaattcttatggctatgtattggaaggtgttgtctattcagaggacgagaggatccagtgcagatatgcagcagcggagagtaatcccacagtttctcagcacatgtctcatttcaactcagaatggaatgcccgcatagacagttttaatattccaaattcccctcaagttcagactctaagaaaccggtcagcggcaattgatggtgaaattgacagggttcttagtaacacattagattccacaagaaactcaaatgcatcaaaggaggagacaaatggtatgcctcctttaacaaaggaggaaataaatggcagtccttcaaaagatgatggaatagtagataaaccagtagaagcacatgtcttgcttactttagaagaaaaggactatacaagtgttagatggaaatatatactgtggaaatcctgcgtatacataatcacattaggaatgttgattgcaatgcttctaggtttgaatatgtcatggactgctatttcagctgcactagctttggtagttcttgatttcaaagatgctaggccaagcttagagaaggtaaaacctatgaacacaacatcttgttcaagatttctttttatttctcttcctcttgaaacactagtaagtagctattgttgttttgttgcaaaactttgaactatctcttggaatgtttttttttctttttcctgaaacaggtttcctattcactcttgatattcttttgtggaatgttcatcacagtagatggcttcaacagaactgggattccaggtgctctttgggatgtcatggagccttattctcgagtaaatcaagctagtggagtagcaatacttgctctagttatattaatcctatcaaatgtggcttcaaacgtaccaactggtatgtgggtgattattctgtcaaaatgtttgcatcaccgcttttctatttacttttgtttttcattttagctttcttgttagtcatgccatatttttgtaaaatctgttttctccgtattcactgagttggttttcaagatgctcttgattgaaagttttattgctcttcgagaaaataagaaatacaggtacttgcttgattgacttgttagccgaaatcattaatgcccttcaatgtcttcattaaggctttccaaagtcaaagcagggctcagacattgtcaatataatagtttttgtactttatgattttcaacatacataggaaaatcttgttttttgattttcacttttaataatatagtttttaattaatgaaattttatcatttgactttgactttgcttttaggttcatatatttttcactaatgaaaaggggtggcaaaaggacagagcattttaggagcataaaaatgaggatagcaaagcgtataaatattggcaatggaaacacttctttaataattcaacataacataaagaatcaactaaagtattataaacaaatgcaattttcactataatttataaataagttgaggttcttctgcttcggaacaaacagaaaatggatgaaatgatcctcaaaattgaagttactgtctttcatatataagaggcataattgcaaagaatcttgaactgcaggtttctgaaaatgtgcagttttggatacttttagaatcaaaacatggagtttcataactgctcaatcataactatgatatttttgaaaatttcaaaactttacagaattagaaaaatccataaattctagaattattcataatgaaattttaagtctttatcttcatttctctttgtatcagaattgtttttaagtagacattgtcactttgatctgatgcagtctttaacaatctagtgtttatgtttgtcagttctattgcttggaggaccagttgcagcctcagctgctgcaatttcccaagcggatgagaagaaagcatggctcatcttggcttgggccagcacagttgcagggaacctttcactattgggatcagctgctaacttgatagtgtgtgaacaagctcgccgagcccccaacattgcatacacattaaccttctggagccatctgaaatttggtcttccttccacccttataatcactgctattggtttgacactcataagatgattggaattttattgaacacagatagtcttacagtagaaatttatacaaaggcaaaataagtttagtgcaaagtgatttagggtagttgggaaaatgtatgtaacaataatggattttctgtgttctaataatttatgttacttacacatagaatcactgattattctgaaagttggcaagggatgctttgttatttcaactttgaaggcaaaagctaatctaagacctgtttcttagtagatgggaatattagagtggtcacaagtgttaaacttgggtacttaggccatctccaactgtgattcttatagggattcttagaaataaaaactctggcttatgaatttatactattgaagttaatatagtggcatcccttcttggaaaataatcaagtctttctgtcttttgttgcgttctcaagaccataacttttaaacttgtgtttctgtaatataccaattcgttaatatagtcgaaccattcttagttaacattatgacaccgagttcttattgtaaccctcattactgaatcagtcttttcttttcaacaattaagaattttttccgtccacttgctgcatgaaaaattaaattacaacatctgagcagttctattaagatttgtaataatgtgactaccaagaacatataaacaattattttgattgtcagaattaacacaaaacatataaatgtaaggtacgttgtgaagctagtttgaagcttttaagaattctactattgaattaaaatttgttgaaattcttaaatcttatatggctgtatagtattctttaaaagtaagttaaagaatgcatgaatgacttttctattggagattggagatactcctaggacctgtttttttttttttcttttcatttggacagaattctacatatcctattaaaatctttctataacaatacacatgatgaagaggtagcaagttactctaatactgttcattctatttccgtttttttacctcctatcggttttgtgattgggctacattgtttgcaacacttcattttaatttgtggctagttaaaattggcccgatatcatgcagagcttttgattttttatccaattccatattcatacatggatggctattgcatcccaaagtattagaacagtatctaataggatcttccagctgtaaatttcaaacttcacaggtggtgactgaacttgttttttagattaacttctcaggttcagtgtatcttgcagcttttttactaaatcaatttaaatataactgtgttcattttatgcattaggacaatgaatttgctgtttattattggtatgtttgggatggtggagcgatcacacaaaatcaaggttaaaatcacggtgcctttgaagtaactccttgttgcttctgaaaaatcacatattttacgtgaatttattggatccaccgcgattttggtggtatccaaacacacactatatgcgattttggaaattcatttgttttgctggttattttgtaggcgttcattgttttgaactcaggatttagtgcattgatttcctgtaaaagcattgtgaactcttcgatgtccatacagatgtgtgtcccgcattgtctgtagaaggattcattcactgatttgttgtccagatttcattaaggtgtaaaaaaacatgacagtgtgttagatttgaaagttagagctaaaaaagttctttatgagatggttgttcatatctacatctatatatgaaaggatttgttgtagttatgttcttcaggtctgtgttcagtatttgtctcaaacatctctgttctattttcaatattcattgaagttaaatctttggcttgtatgacaaattgaaggatgtttaccttggtaaacagaagtggaggtttaaggtgagagtggtttgcatttgtgatatgtgtcaagttagtgatcccattatccacttgaatttgtacagagatgtttgcaaaaatatatcacaatgatgctttatacaaggaattgtggcatgtctgtgtcaacctttgacactcttttgagtgaaggagagagggtttattacttccctcaaggtcatatggaacacgtacaagttgtatgggcatgtgctcttaatttctgactttaattacagttagatgcttgtgctactattatcttgctccatatcatgttttggatactagcataattgttttgtttccattttccaattaagatcttattggtgttggcatggttcacctaacagtgttttctcttgacaattttatctataaaatttttatttttcttgatctgacttgtatgctagcaggaggcgtctttgtttacggtgtgtttgctgtaagttttaaaattgcacaagttgcgtctggtggcatttcagtttggatatgttagatatattgaactcagttactatttctatttccccttaagttttaaatgttaaaataaataaataaattgagagattaaaccaaatttgggtgtattttaattatagatttcatgccaggatttagtgattttggatttcttcagtgtcaagatttgttggtttatttaattttaatttatttattttcttgactgatttaattgcctttgctatttttgcagtgtctatctctgaatatccaagatcttcaaaggcaatgctatctctgagaaacatttttctgaggaatgtataagcttgatatttgctttcctttgatgattcatatttgttcctttttgggactttactgtttaagagagattttctttctgcagtgaagaggtcaaatacaagagcaacttattccttgaaaattctcctctttttttttttttgttggtgaattgaaaattcttcttttagagcagagaccaaatcataattttattgggccaaagtgccaaacccgaagggaattggttccaattttgttaatctaattatctataattcaagagaaagaagagacacatgcaatacctataatgtgtttacagtggatagaaagtttaaagtgtcacaaatacaaaaacagcttcaagtggatctagaacaagtatagtgacatttactattgtaagatgttatacataaaatgatcgatatatatatatatatatatatatatatatatatatatatatatatatatatatatatatatatatatatatatatatctgcaaggcttcattggctgggctttggtaagagcagactagccgatgctatgtagcaagcaagatttcgaaatgtttctaaaaattgtgatttaagtaataaactctttttcttctttagttattttcttttggatgtgttcttaacttcttgtatgatctgaaatagtagaaattttattataattttctattttattaattttaacaaccaacctttcttttataatttatatcttattttatattctagatatatgatgcctagtcaaataataaagctaataaaataatttattcattaagtaataaactctttttcttctttagctattttcttttgaatatcttcttaacttcttgtacaattatttgaatagtagaaatcttattataattttttactttattaattttaacaacgaatctttcttttataatttatcataaaaggagatttgacacttcattttaacctaaaaccttaaaaagtgtatagctgttctccttacttatatgttgttcaacttttccacttctatctgaggtaagatttcactttacatttcactttacatttctactccaacaatatttagattaatagtgcatatatcctttattacataaaagctttacttcatatataagatatttgttatacttggcgttggcgagaaagaaaaggctttctatgtattgatagcataaatgtgtaatttggattgcatactgctgcatagaccaactgtagaataatgtttaccagtaaaaaaacttttcagcattttagaaggaacaaaacacgtaaaaaaaaggaacaaaactcaattataagcaactcatactagctcttgccatacttcaaattcaacctataaatgatagggtgtaaaaaataatatgtaccattatatatattattttttacaaatgaacaaataatcaagcaaaagtacaaaactgtcaaatttaaagtatccccctccccttatttccttggtgcaaaagtaccgatgtacatgtagaatttcacaaagcataaattgtattttatgtaacatattgttcttggtagacaggaaagaaattgcagaaatgaaaagaagactagcagcacaaatatatggcatactccctagctatcatatcaaccaaaaggatacgtatatacgagcaaatgcacacaacctatcatatcaaccaaaaaaaggatatatgactcatgtcagaaggtggagtttcaattccaacatggtaacgttgttctcaccatgaactcccatttttgcaaaaaaatatgctcccaagtttgtctctctaagaacatggccaacagagcaatccctcaaaagttgtagcaagatacggatgtctgctatgataaccggcctctcctaaaggtgagaagatgagtgtgataggaagtgatcaactagaccagacacatatatagatgatagacttattaggttattaactagctaggttaaacattaactacaacaaaacaataagtgattgaataactatcaacaagcgacttatatttcatcaaattgtgatttttttggaacccataagagagatctaaagaaaatttgtcgaatacttctatactgaatagatattcggtcaaaatagcaggataggtgttcggctcactacgagacaaaaagagtcctaagtaagaagcaatgaagattaagcccttaatcatagaatcatatatatcacctaaaaatggcaatcacccgaaagttcaagggccaaggttgaaaaatgttagtataattaaataaaaatgagatgtttaaggtaaaggtagctgttcaccctcatttattaatgatatttattactctgaactggaatcttacttgaattcagaatgtttttttttttttcacagatactcattttttaaagtattacttcatcgatcgaatactaaaagaaaacatattaaagtaaaaaacacaaaaaaaaagagaaggtatctgatcatcttttggtcggaacaattcctttaagtaaaaatttttaaaaaaggagatggtatatattatagttcaagagacagattttgagtaataacttatattgaccactgcaaaaaaaaaaaaaaaagaagaaagtttgaagactagaacttctatcagatacaatactcttactcttgtctaatattgagtacacatttagtttcgcttgtaatttggcatgtttccttcaaattaacccattatatagattaaatattaatttgacgatcttgtcgtcattcagtgacatgaatttcattaacacgtggaagttgaataatgacttgggttccaacttctacgcttaaaattttgccaatagttgccaatttgcaagaattctatactggatcgatatggtatgggtaagtttataatcagaataagacattacttttattgaaagtttcaactgaatttattttaccttctcttctttatctgaatatctaattacaaagcaaaattttttacgtaaataatgaaaggcaaaagttaaaagttaaaacaatcttaaaaatctagaatttaaatcagtacagaatcaaatataaatattatatatataaattcaattggtgtataaaaccttttctattacaacaataattattacataaaattttcaacattattctataaacaaaatcaaagaattgagtattcttgtgtgtgtctttatttatcaagaacttaattgaaatatgttaatgaaataaatatcttttatactgtacactaataatggattgctatatattatgaaaatagtattaactctgataataataattacttgttataatgtaaagtttaatttctaatagttgaaacttgatagttatactaactatatataaaaattatgttcatctattgataaagaaacagattaaacaaaaaatggtaatcttgtcagttgtcacactaaaattcaagatgaatgatctattaatcctataaagtactagccatcgagactctagtgcgcaccaccagagaaaaaggtgattgcctcattccatcaaactttactactacaaattcaagacatacgatatccaatattcctataatgtactagccatatagactctagtgtgcaccagtagaaaggttcttgtccttattccatcaaactacttcttgtcacaagccaatatatacaacacaataagatttaattttgttttgtaagatattttaaaattataaagaacttgtagttcaaaatatcttattttgatacctataattgtaatctttttactcttttgatcattgtcatgaaatctctactaataacaccctttaaaagtagcatgacataactcatttaatccgtgttcatcgagtaaatattttgaagtcttgacacatttctaaaaggaagagccaaactacctgcgaaaaagaagattcaatcaatacatttagataagctttctgagtagatttattgtcataattttaaaaatcagaccctgtcagttctcgtaaatttatgtttttttttaaatacttggtgcgtagtcctcttcacttcatttgattgcttatacctatcacaatcgcttagaacatagtcatagctctctatatggctaaacacatgcattcacagtacatttgatgatttcgaacgttgccaccatgtatgtagactgcaagtgtcctcattacatattatattacatatgtgatatttagtaatatttttttagtttaatacttaataaaaaatttgttaaatatctttgataatattaaaaaaaatatctttaaattataaataaactttataaatatgtttttatgatattttgatattttttaatgttataaaaaaattttaataatatttttattaagtctcagacaaaaaaaatattattaaaggtcacatatataatataatagtgtgttacttttgtttcgctggggttgacataaaattaattttagtttaaaggttatattacaaaataagtattttttatataagtattttttttaaagaagtagatatgattcttttcttaaactaagtatttaaccaaaaatattttagacaaacacattaaaaagaaaaaaaatacttattttattaaaataaaaatttatttcaacaaataaatttaaacaaatttactcactatcatatacacttttgggtccggaacaatgctcgagataaattgtgctttcaaactttgatttggatgctttgtctcattttaacttaccacaaaaggaatgtccaatgatcataaaataaaatagatccattgttcaatgccaaatggttttagaactatctttgttagactatacatatattggtttaagtggatattgccactttctttttttccaagtacactacttacattaacacattaattagtattcaccattcttattcatttgatgactttgttaattattcatcaaaattgtaagattggatcattatgtgtattaatagtatttatttaccctttttaataaaataaaaacaaatttttgagcatttagttttctcttgatgagaaaaattaaaatgatagtcattatatgatttcaaagtgatacaaagaaagaccttcttctcttttttatttatcgtatagactaaagccttttctctttctttaaaaaagaaaaacaaaattaacaagacagagcatcatactgctgagagatatttattaacacacccttcatatctaatcaagttctttttaataattggccacgcttcttttgtgtgaaacagacctagcctgtctcccttttttcaagccatgcctgacctgcatttagtaagtctctcacacatatgatgcacaaacaagttttgtttggaatagacagcacctcacttgatgaaaccaccaaagtgcaccaccttcctttttctttcgatgaatgttatgatagcagaattttcacaacgaagcaaacacctagtttatcatcaatttcatatggattataaaagtttttgttcttgatttttttaaaatttaattcttaatcattgaataaaaatttgactgatcaagattctttttaatctctgaacaaaaatttgacaaaacaaacatctttaaattttttacaagtgcctcaataaaagtttggatgccattattattattatttaatatgaggtttcaggactaactttactatcattatctttgcacaacttgtgctgagggtggtttgattttaataatatatctttggcttataataaaaaaaattatattcctagctaatcaatgagacgagatggaacctctagaataaaatcacaaaattaagtgctgaaattcataaaactagaaaggaaaaaaatgagctcgatcaattttgttgttgtcaaacaccttatgtagataagtatttttaaaaaatagaataagggacccatatatcatccattgtcgtgttttccaccaactgataatgtcatcactcatcagccagacaacaagaaattaacctaattaaatatatagcaaattaaacaaatcgatcccacctatgcaatttaattatacaggtgtccatgttgagagggtgcatgtacatgtaagtgggagtttaaagcatagaacacagtggaagtaaaatgcaatacaagtgtgcatgttgaacaaaggtctcttttcttcttctaattattaactctttccttttgtctttagacaaaattgagtgctagtacacagtgtcatcacacttagcactcgcatcgcacctgcacgttacttttactttataatttgataggttgttgtagtaagatgttttaccagttaaatattaaagtacgtaccactttattgcattaacgttctccatttttttaattaatattttctatccgattttttaatttattctttctcatctttctttgtttggacaaaattgagtgtcaatatataatgtcaacactttgcaccccatgcagataaaagctttatcatttgttacatagttttaagaattaacatttcgtattaggttacttaccacttaattgtatatttgcattaacatatttacagcttttgacaaacgtacttaaaagcatctcaaatgcgggtatcgtgaaggattttttaagtaaaaaaactcttataggttctttcacattagagtaaatctatgtaataagaaaattttctttaaaataaaatatatatcttttacaagaaacttttttttaataataaaaaataatatttatctctcacataacaacattctaattaattaagtgaaaataaaaatataaaaaatgagtttttttgaatttttttaaaatttcttaccatccgaataaaattatatataaatttaataaaattatatataaatttcttaacaccacactttagtgataaaaaggtaatataaagaccaaaaaaaaacttaaaaaattcacattaaaaatatgcttctggccatacgttggcaaagcatttattgcttatatcttgctcatggggcggttttaagataacgcactgttctgatattatatacttctacctaattttaactaatatagaaaattatcatgggtaggatttatttttggtgaatttgtttttttatcatgggtaggatataatcacgagccctaatgtgtaaagtttccaacccactaaggggaagaagaggaacccattaactattttataatttaatgtaggagaacgaatctaagcttttatacacagcatgcagacagacttgagaataattttgagtatatttttttatcatatacaaaatatttattttattaataattaatcaccataaaaaatttaactaataaatttaatgaatttttttattttactcatataacttttatatataaaactcaaacttaatcttataagaaattcatagtcacttctacacaaatataatattggtaatgtgtatgcaaatgttgtcattaaaataagaaaataaaataatcgatcagtctctatcaggtgatatgaaatctggaatctcgtggttcaaaagtcctgtgagttcgagaggatttggcattaacaagaaaaatacattttatattgcaatttaacatctgcttgtgattttgagattttctatcttcatttcttcgggtcaatgaaactgacatttaagtatctatttcaaggttgaaaattttaatgttaaaccatggaaattgtgaatctttggttgttcatgcattgctttatcagacaataaaaaaaaaattcacattttgttcctattagtataaataagaagttaattgataatataaatattataatctagtcttaaaagatgatctgtcatatgttataacttaaaccttatataatatcaatattaatgattttaagttaatttatatcatgagagcaaacttaacagctattcgttcacatacgatattatttttagtggattgatttatcttaataattacttttttttatgattataggctacacttcctggacttttgtccaagggggatgtccattgaagaaggtgaagaggagtgtcaaagtagaagttgaagtgtggtcatgtcattgctttaataaatttcaatgttcaatcttttcatgaaagtgaattggagaaataatatttggattaagagtaaattacataatttactcctgagatatggtaaaattatttagagacttcctatttttttaaccaattaattagaataatatagtgtaatattttcaaatattaaaaagggcattattaatgtaacatatataaagatgtgagtgtaatattttcatacataaaattaattagtgtaaaaacaaaaagagtaatgctatacgtaattttaaaaaggttcagtaagtaccattgtaatttatttcaaagatatataattttttttgcaatgatagtaataaagtttcggtttgtgattttatacaaactactcaagtctttcattaataattaatcttaatttaatatgacaataatgttttattcacccatatttttcagttatatcttcacacctttgctttacattaattttcttcttttttatcttaaagaagagtataaagatatgtatgaaatatttttttttatccataggaatgaaagacatgtacataaaatatataagtatttaaaatataataaatgtacgacattggaaagatttcattatcaaattaattatacaaatgaatttgatattacattcaactcaaaatctcaaaacattatgttcacgattccttaattatatattactcaatttattcatttttattcaatatgatattttacctttatacttagattgtaagagtctctttcaagtgaaagtctcttacacatgctataatttctctcaagtgaaagcttttttctatccacaagtatttaaatagacccttaaagtttaatcattaatgccaatatgatctaaataataatcacgctattaggtccttgaagcttattcattattaccaacatactataaatacttggatctcaacacattcataaaaactttgatacaaggaattttctagtccaagtggatcacatggtccaacaagaaaaaataaacaataagtaatttcctcgatgaatgatgagcaaaccagacaattaaacttaataatacactaattactatataatattagactttatatttacatttgcacttcaacaataaataaataaaattataaagtgacaatcaatatattatatcctcttctattcaacggcaagaaaaatagtaagatgagttagagagaacaatacaaagttacactcattcgtcttaattagctgataagaaaaaaaaaacaaaaaactcattcgtcttaactgaaaatgatatccaatccctgactacctgccaataattccactagctaacagctataaccatctcttacaagtaaattttttatatataagtctctataatgatgttaatatttttctaataaacatattgacaatatagtgttacgtaacactattttgtacggattaatgggttatgcttgcacgaattgtacggattatatacatggattaatctcctttttttaaaaataaacattaattaaaaaaatataaaataagtctttcacagaaatcacgttcgtacagatattacaaaaaaaaaaggtactcgtcagcatttttcattccttaatatcatgtggtagtgatttataaattagtaaattataaagtggtgttcttttctatatgtaacaaaaaaagaatgataaggtggtgtcacatgtggtaagtgaaattatgtgttagctagtattattttggttaaaggatcaattttcccattatagtatgatgagctgtcaatttagtcattaaaaataataaaattaaaaaatgtctttaaatatttctctgttatcactttattaatctttaaatttaattatttactattatagtctctaaaaatatgttaatatatattattatttttaaataaatattatttattggtttattaatttttgttagtaagagaaaactaatcttataccttcatgctaataatactatcacttaagtcataatttttttaattttagactaaaatgaatgaagaattacacttttgaactttctttgaattttattattttcaagaattatattaattagcaatgcatcactctcaaaataaaattgatcatttattctaacattttcaattataacgtagtggagtagtggcatatatatactcacgatttaatttttattagcgaaaaaaaatcaatcttataactcaatgctaataaaattaattatcatttaagtcataatttttttaatattaaactaaaatgagtgatgaattacactttcgaactttctttgaattttattattttcaaggattaaattaattaacagtgcatcacacgctttcagaaacaaaatataattgatcatttactctaacattttcaattataagtagtggactactagtatatatatatatacccacgatttaattaaaaagttgttggtctcgagaaattatcacgtgcctcaaatttaattacttttttaaaaatgaagaaaaaattgttcattcgtgtaattctaaattggaagttattaccgaagttgccattttcttcttatcctccaggtgcacttatataatagaaagtcacctttcagcatgtggtatgaagttttcgtgataggttttcagctttaaggatgctgcagttctcttctcttattttccaaatagattaaaatatttctaaatctcaatcccgaaaaagacttacaaaacgtttatagctttttcatgaagtaaatccaatgcaaggactgcaaggtgtggaattccaagttatatcgaagcccatgaaagaattttctttataaggtaagactatgatgtaaaaaagtttgataaacgtttttgctgttttccttttgcagttttattaaattaaacgttatgtatgattattttgatgattatttgcacaatatgtttacgtactatgcatgaccacataaattaaaatgaaataaagagaatatgggatttcatcgttatctttgagatgcaacgtatttgtaaatatattgttttaaatattaatatatatgctgattttactgaataatttttttacgtttgctagctcttaattgttttccatttctgggttgtattatgggtccttttatttacttagagtaggcttgtttatgaaggaagtgaatattcgtgcattttgagattttgatcaccttctgggatatagcacatcatttaggtcgttgaaagtgtatatgacactgtcatattatataaaagtaagattttttttttaaaaaaaatattactgaaagtgtaatctgccaattattttagtccaagtttatatagatgagtagggtttaatgatttttgctgggtttgatgattagggtaatagtttacatagagggtttatttttggggtgcatatatttaggctagaggattcatcattttacataactattgagctagttgtgtaaggggcaagtattccttgtacccttcatcttcttccttatattaataatgtttgctcttagccaataaacaaaaaatagtttaaatttcagaatatcattacttaaatgataatattaatatatttaagaacaaaggaaacagttacgtttaggagcttaattatttgacattttaggaactttaaaaaaaatgaaaatttgagaatttaacgtgactatatttacactttcagaccaaaatggtgttttatctaagtttttatagtcctatcgggctagaacctaccccatatgtagtttaatttcctccatgttaactatgtaactactctattttgtttgtttgcacctaccaagtatggcacatagcaatttaaaaaagaaattagtggcccttatgcactattttctttttgaaaggggaaaagaaaaaggaaactaatacatagcttgagtacatctttgatgtcgttatagtgtttgaataacaagagatttggatttagtaattatatggaggatgcacatgatgtagttggaaaatatcttatcttattaaatatcgtctaatgattgagaccacatcgattaaacataagagatactcttaattttcaataattttttttatcattactcttaatctcaaaggtaaagaatcacgttttttttattttatcaatactccatttccttaattactacaccaaatctatatcctatgctatgtgagtcatttctctcctaaagaaggaacataataacaatatagtagaaatagcataacaatttactgctatgataattggatttcttgagtatattgacgagaatttgattctttattcatacacatagaaaatactttactaattaagaaagaaaaaaaaatattttaataatttctacgtcttaaaaaattagtctcagggtctttttaattgtggtggtatcttgcttttagcaaaaagaaacaatggtaacaatataattatcaactggattgcaattattagtatagttttgattcttttttattggtaatgcttgttggccagctaacatttttttcttaatattttgactttgatttctatgagtttgttcatgttttatactccgttattgtcatagtaatttataaatattttacttcatttatgttttagaatctatatcctttcttttaattgaatagcaggatctagttatacaaactgaaaagaaaagaacaatcattatcaatgggataaaaaatattcctttcttgtctaatatatcatattaactatttaatagtggaaataaattccaatcatatgttttgtactatgtcgaaatttatgtattttagtatatcaaatactcatttcttgtatggattttttttatatataaaaaaaaaattatacccatacaacgtactaatgtaataggttctcaaaggcttcccttgcgtgaatacttcaaaaatatttcaaccttttgatggaagcaagacggagagataagattgaatgtaaatacaaatatcacatcgatgttaaaatattaattcatcctatccaaattatcattatgttaatgttttgtggagagtatcaattgcaacatggtatcatgtggtagttatttcaaaattacttattaaatataaagtggtttgaagtgacgtaagtgcaagtatatgtgtgagtggcattttcaattaaaaagacagtggtacgtcctagatttaataaaaatatttgtcagtattaaaaaaaaatctcgtgctttttatttgattgctgaagaaaaaaattaacaattatgtagtataagttataaaaaaaatcatattctccctcaacaagaaattatagttaataagagtttcaaaaaagttactataatgatcaaccagcttattttatgtgataatttattattaaattatataaaattattttatattatcagtgtataatttatttttaaaaaaaaaatacataaatagtttattgtgtcagataaattctgattggaagctattaaagttgccctttagaacttttatatattttccagtgtgcacatatataaaagagggtcacctttcacctagtggtatgaagtggaagtgtcttgaacaatagtcttcagctctgaggatgctgcaattctcttccaccattttccaaacaaattaaaatgtttctgaatccaatttggaaaccaaaaagttcgtagcttttcatagagctttcaagtaattagccccgtgaaatatttttctttttacgcaagatgacaccacgggccttctaactgaaacaagcaataataataacaggccaaggaaaaactcagcagcattctgttagaaggaaaacacttatctctattagcatatttgtctccattaatctcttacttcagtcctctatcaggtaagagtaggacgtaaaatgtgtgatagatgtttgtgttattgttttccttttccagttctgttgaattaaatgctgtattatatgatatccttgctgctaatatgcttaactgaatgagttttttacgtatgctctacgtgttttccaattcttgctttttctaaaagaatttcttgaacctcccctcatatttcctttgtgaacttaccagatttcatgcattttgagagtcatagaatttcttattatagttaggccgattctgctagaatctagctactgcatgcatgtactttgttcaatatgtgtcagtgatccataagtaatgcataatacacatgttagtccatatgggatctggaatttgatcaataatatttgcagatgatttcataacagactgatatacgtgcaacgtaattgttagaatagatttcgataccaccttaattttgaatttaggatctaacttaacggatggaaactatcttttatttatatgttctattttaccgtatctttattttatgtgaaatctccaacattctacctgcaatcacagtatattttttatacgattttataagtaatggttacaaaaggaaactagtacccaacttgtgtacggtttattagtaccaatttttcttttaaccaaaaagctgatatgcaactctgctgtagtggtatgtctttgatacggtttggccgtatagttgtgacaagaactaggcatttttgtttgggaaaaaagtgattattgcctttttatgctaaaagaatatgtttttctttatattttccaaaaaaaatatttacttgtattgtgtaattagtcgattatctgaaagtcgtccataatatgtatttgcttagacatccaagaagagtgacgcacgttcacttgatacaaatataattagcttttccatcagtcgtacagtttgaacgcaaaaaaagattaaaaagtgcctaagaaattctgacattaaaaatctatcagaaattactcttacaaaatcacagttaactttcaaaaagttgatctaaaccatacaagtatttttttttaagtatactattttgatatttggtaaaaaaaaaaaaaaaacttaccgattttttatattgttgtgattctctattttgctattgcttggtttgttggtgggtcatcttttttttttttttttggtttatgagcttggtacgctattatcctccagatatttttcacgataattacaactttcatgttttatgctatgcttgaaaattcaggtgattttattttttacaaagttgtcatgttttgtaatatcaaattcaaatgtcttatccatatttaattacgaaaaaattatattaacacaaagtataggcctaccggtatcatgcaacgtagtttagctatgtcatataccatgaacttatctactttaaatgctcttcaataataatgattcacttaattcatgtctcaaagtcaaaggtttgattttcttgcattcttactaagttgctaaccaattggtttttcatgttcaggaaattcctaccaaacaaaattcatttgtgttggcctagaggtgaagtttatagcatttgctttgaagtttggaaattgttgcttgttcaatcacaacaatggctttagctcctacttcaaaagttgtccttggttcaatagcctttgctatcttctgggtactagcagttttcccagctgtgccttttctacccattgggagaactgcagggtccctgcttggtgccatgcttatggtcatattcaaagttcttagtccagatcaagcttatgctgcaattgatctcccaattcttggtcttctttttgggactatggctgtcactatttttcttgaaagagcaaacatgttcaagtacttggggaaattgctctcttggaaaagtagaggaccaaaggacttactttgtagaatctgtctcatttctgctatctcaagtgcttttttcaccaatgacacttcttgcattgtgttgactgaatttgtgttgaaaattgcaaggcaacataacctcccaccttaccctttccttcttgcacttgctacaagtgctaatattggatcctcagcaaccccaattgggaacccccagaatttggttatagctattcaaggtaaaatatcatttgggaggtttctgataggtattcttccagctatgcttgtaggagttgtggtgaatgttgtatttcttatagccatgtattggaaggtactatcttgtcctaaggatgaagaggatccagtttcagaagttgtagtggatgaggaggttgtttctcatcagttttctccagccagaatgtctcattttacatcctttaattctcaagaatgcaatggcagtgtagaacttgctaatagtattcaaaactcttcccaagttcatgttatgagagaccaatcaactccaagtgaaagtgaagttcagatggttcatagtggcacaaaggatttcacaacaaactcaaatgcatccaaggaagggacaaatgatacaaaggaggaaactaatccttcaaaaaatgttgcaatagtagtggataaacctattgaagcacttgttatactctcttcaggagaaaaggactatatgaacaaaaaatggaagagggtactgtggaaatcttgtgtttatgcaatcacactagtaatgttgattgcaatgctcattggtttgaatatggcatggactgcaattgcagctgcaataactttggtggttcttgatttcaaagatgcagggccaagcttagacaaggtaaagcttatataacacaaccgcttgtacaaaacctcattttctctcttttccatttgaaatgctagctattgttattcttgtgccaactgaacttcgaacaatctcttaaagtgattttcttcttggaacaggtctcatattcacttttggtattcttctgtggaatgtttatcacagtagagggctttaagtccactggaattcctagtgctatgtgggacttaatggagccctattctcgaatagatcatgctagtgaaacagctatacttgctatagttatacttgtcctatcaaatttggcttcaaacgtaccaacaggtaagtgcatgatcttcctgccaaaataattatttttctggtacaacttgtttatttatatgttacccatctattttatgttcgattcatgattaaaagacggtctactaattttttttaccttgcttaaatgacaattagtgaatggtaaatcttcaaatggcttctgttatgcatgacttatattgtttcctagaattagttatacgtaacatgcagcatttttttaattaatttgaactttcatgactgctataagatataatgttaaatttatgtgtttgacattagtcaattttaaatttttaaaccaagtttgatataaactatagtagcatacaaaaagaaatatgttaggattatattttccctaaaattttcaattgtcatgggcaaaaaaaagtatgcaatgttaagtcataatacatatatgcaatctagatttagtcataatgaaggttcacattcatttcttgtctaaactaccagtattttttttttttatatccatacttagcaagagccattttcatttgatgcatcacaatcttctattcatatgttttctagttctattgcttggagcaagagttgcagcctcagctgctgcaatttccaaaggagatgaggagagggcatggctaatcttagcttgggttagcactatagcagggaacttttcactattaggatcagctgccaacttgatagtgtgtgaacaagctcgtcgagctccaaaccttggatacacattaaccttttggactcatctaaaagttggccttccttcaactcttatagtcactgctattgggttgacactcataaaatgataagagtttactaaaaatccaaagaatcttatcgtagaagtttacacaagcaaagtcagttaattgtaatgtattttaacgttgtgttagaaaatataggtagatgaacaaggaattttctctgtttttgttgttaatatcgtcaaataagtatatgattgtgatggtcctagctaaaagtttgttaggaatgcttttgaaatttcaattagtaatgaatgttagtttgggagttatgtgaaatctttggcagcagaatttactttcctccaattactttctgtgcgtggggcattcagcaaactacgaccccacttttaagtaatgaattggtttttaattttgtcaattacttgactttttttctattgaactatgaaagtgacacatatatgcatgatatatgtgccaaaaaaaccatccttccatatagagctcgcaaaatggaccgcatcagctagttcactgttggcctattgattcaggtcgagttagactaataaaatgttaatccaaatagaattgtgactatttggactagtctactatcaggttatattggactcaaaaaatattggtgtgaattcaattgagcctattttgatataatatattttttttaatttttatttttttcttttgaatctgtaaaaatttagataaaaaagtaaaatatagatcaatataagtcagtctaatgggccatcgagcctggtcaaactttaacaaatgagtctcatataaaatatgaacttgtctaactaagtcctttttctcacttaattgatggactaggtgaagtcgactcatccatttggtcatccctacttacatatataagagtttcaccataaccaactacacctcttgccactaacatttagtaaaaaaaaatatattttaatttagttatcgttttacaaaataaatgaagtattaaatgtttttttttcatgagatactcttagtgagagtaattattatagtgtagtaaatgagaaaaatatctaattaattatagagataaaaaagaatattagaaagatattaattagatttcttaataatgtatcaaaatcttaaacatcatataaaatgaaatgaaaggagtggtaattaattctatctcggtctaagatcttgaatcactggggttaaattatttttaaggcttaattattatttttgtcttctaattcaaatatgaagttcaatttgatcctcttattattaaaatgtttgattaggttctttaatttttaaaagtgtttcagttaggttcttttatttttagaagttttaattaggttccttaatttttaaaataaattcaactttatcctatttaaaatcaaatttgatcttattttttaaaaaaatttggagcacatgaaagaaaaataagatcaaattgaacctattttaaaaaataaatgacttaattgaaacttctaaaagtaaaaggacctaattaagtcatttaaaaaaaatcagatcagaggactaaattgaactttttaatattaagagaatcaaattgaacttcaaaattaaattagaagatcaaaatagtaactaagcctatttttaaaaataataagtaataaaaattattatcatagaattgaacaaaatgttagatggaatgacatatacaattggaaaaaaaaaagtaaaatatctagagatactactactacataaaagatgttagttaattacctgggcattctttggttaagattctccccgaaatggttgtatgcattgattccttgcatatgctgatcgtggacataagagtcacgttgagccagtagcataacctgaataattttgaagtcaataaactcaacactaactctctatggccgtactacttggttaaaacaaagtaaacacatgatgagagaattccttcaaatattttaaccaaaaggactattaattagtagatcgacctagttaggggatgaagcagttgttggaaatggtaatggcagtggagcccataacagcaccaattaggccatcagtgcaattgaagagtgagtcgttgtggtcaatccataagtgatgactagaaccaaagatggggatgccatctccatcagttacatggtgacagattaaataaaatataatgtaaatcaaatcaataaaagatgcacttattggctaaaaaaaaggactcattcatcaaattatttatccagtttaaaattaaattatatagattttttatttttgttttttactcaatttcaaaaaagtgaaataaaattagtaaaataattaatcaataaaaataaaatattctaaaaacttatagaaaacttaaaatttgataagtcattttatttattttattttattattatgcaaatggttgggattttcactttcattttatttgcatctaatattgtacttaataatgcatttatcaaaattaagtgaaaaaataaaattattttaataaaattgtctcctgataaatataaattctcttgaaatatttattttcttttgggacgaagggttttttttttttgcattttaagatctagtttaatagaatctattattgtagtactattattgagattttgtattattgtagtcctattatgctataatccaccacatgtagtttaatttgctcaactctgtcactactctattttgtgagttttgcacgtaccaagtgggggtacatagcaatttaaaaagagatacacaattttggatcacaacttagatgtagatgaatttcaatccttagatgaaaatcaggtcattcatgtttttctgatttcaccaattacgtcttccccttactacatttccaaatctctgatactaataaccccggacccaatatatataaaggtgtaagtctgctttctcaaacctccacctttttcactcatcaaataaatcagaaattaatatcaaataaattgtatcttcaaaatttaaatgttttcttaacatgcatatggtatattattttatgtttttaatataaactgaatgatttaactttaattttttatttcttttatttatcatttttaacatttttaattctaaattgaatttgcatatttcttaaaaaatatcaataaataaaataaattatttatcataaatctaaaatattatttatatgtttaaaaatattatttattacaaattttagttgtaatataatttattttgtgcgatgtacaaattaaaatagatattttacttccttgaagttttacattttttttaagagtaattcatctgattttattccaaaacagaaatcaaattacatcagattgaatcaggagggcaacttggtgaggaaaatccttcatccaatatactccctcgactagagctctgccatatgtagcatgcagtttcttgtaatctgtttcaaacttcacatgagagaacaaagcctgcgaagctgttatgatagcccatcaaataaagtacctcagaacacattaattctggcagcacatattggttgcatttaatttaatcttgattagcctgggtggaaacctctcaaggttgatcaatatcatgtaaaagctgacactgtttcagttacaaagttttaaaattttgaccatttcttatcgtttttgtttctgaagtcgaccatttcttatatcctgaagtgaagagaaaacgtagttgttatcaaagaaacattcatcatgattgattataggatttatttgcagtaaaaaaaaattaaagggtttattaattatattgataaataattatatttgaggtgaaaaattatatgcttttgcttagtaactatagatcattcaaatctttacccaaaaaaaaaaagatcattcaaatattatgttttatactatgttggaaatttatgtaacttttttatgtttgaaatgaaatcttaatcacatacttaattagattaatcacatgagattatgtttagaagatttcaggatgagttttcgatttagttctaaaaatttaacaataatatttttagtgatttattgacttgcaggtatagatataaactaatacagaaatgagaatcagaagttgttacccgtgtaaatgccggtgctggtacatgtctacgcacaataccctacccagaccttatttacaaatgatcctattcaaattaagagtaactcgaactcgtcaaatcctaattatcatcatataaatatctggtgaaaagtgctttgtaatgtatagttatttcaaaaattgataaagtggggtgacttgacctaagtcataatgaaaagtgctttgtcatgtagtagttaattatttcaaaattgataaagtggagtgacttgacctaactaagtatgtgattaaaaacttgattttttaattagtataaatgaaaatatttattgtaagagactagttttttaaataaatattaatattttaaaaagattaatcttaattttcaaaaaacaatatctgaataaatagatatatgctccaatatatatgcatgacgctcaaaaccgcgcagggaggcaacaaattaacaaacaacagtagctagtattttaacattatagaattttaagtcaacagacatgcacattaaaaattgaattttggaaattaaatttttattattaagatttagatgacttatatgcaaagtaaaatattatattttactaaatgaagattatttaaatgaatatattagaagttgtttttatttcaacttttaagagagtttatttttgtttcaacttaatttatttattatagttggtgataatttttaccgtgaaaaaaaatagtatatgaagagaaagtgtgtgagaagaaagattgtgaaacaacagtcactttgttgatagaaaaatgattttgtgtaagaatgttatcattttttgtaacgtattcggttttatagggtgatacactatttgggaagagttacactctttaatcatttttgtgatagtgaaatacttttgaaatgattatgtgaatgtaagcaaaaaatgtcgcgttaaattcgtatgtttgttattatttttcttgtggtataatttttattgtgtttttataatctttcgtgtgaagattgattatccaacacattttaattataggtatgtcctacatttgtctctatccaaaatcctcatgcctttaatttgatatgaatacatgtttcaacagcttcttacaaacatatatataatcttataaatatattctttattattaattaaaatttataaatttcacttcttatttaaaaaattaatatcactcataattttataattttattaataaaaaatatattaagaaaaatgtgttgaaaaatatctcaaataataatgattggaagctattactaaagttgccgcatatgacttttataatccagagtgtccgtataaatagagggtccactttcaccaagtagtaccaagttaagttgcctcttatgacttttatactcaaagagtgtacatgaaaagtgcaaagagagggtcacttttcgccaagtggtattacacagttgccgcttatgacttatcctttctcaccaggttgctagcatggaagaagtgtacttaattagtgtgcacaaatataaatagagggtcaccttaatttctcattctcacaccaagtattagtgtcttgacaagttttcagctctgttgcaattccctcttccaccattttgctagcaaactcacatttttatactcaatccaattcagaaaaaaactcttacaaaagttcatatagcttttcatggagccttcaagttattaaggtaagaatagcgagtaaagtgtgtgcatgataagtgtctgtgttgtttttctattccagctcttttgaattaattgttatatgtatattatataatatctttgcttctaattggatcaattttgttttccaatataattctggctttcatgggtggttttgatttactaatagcgtgtttatggaaactcgtttaagaaataacgtttgggatgtgaaagctataagtattagtttctgaaaatcatatctaaaacgtggaaaatcacatcccaaacacgctataaaaataacatagaaacttggtttttctgaaagaagtggttgaaaccgtccactaatattatctttgtgtacttaatagatttcatgcatgcattttgagagttcaataaaatccttattgtagtcccattttgctggaatgcacggcatgtactttattctatatatatttactgtgtcagtactccattaaatgatgcatatacacatgctaggtacccatttgagatattgaatatggataaatagccttttaaaaaatgaaaaagaaaagaaactggtatatggagcttgtgtacggcttatatgtaccagtttttttttttcttttaccaaaaagctgatacgctgctcagccagctcaggtatatctttaatgctgttggaccatacaaatttgataccaattagcattgttttgttgacaaaacaaaaaggtcattttcctccaataagatatcaacacagtggcccgcgatgttgactgtgtgttgaaaaagtgattattactattatgttgtgattcctcaattattggtattccttgtttgttggttggctataaccattttttttatattatagattatttatattaatttatgagcttgttaatttattatcctaattaagttgtttttcaagataattgcttcctttaatttttatgctatgcttggaaagtcatgtgattttatgtttaatacactgctggcatgttttatagtacatcaaattcaaatgtcttgtccatatttaatttatttatctgtttgcaaaaatttaattaacccacagtatacgatacctgtattcatgtgatgtagcagacctctgtcaaataccataaacaatatattcatactccgatccacgttcccgcttgatcattaatattcaataataatgattcacttaattcatgtctcaaagtagtagattgaataagaagaggaatataatagattggtttttcatgcactcttacaaagttactaatcaattggctttccatgttcaggaaattgtaccaaacaaaattctattgtgttcgcctagaagtggaggcttgaattaacatttgtttggaaattgttgcttgtttaaccacaacaatggcattggctcttactccaacagttgtctttggctcaatagcctttgcagttttctgggttctagcagttttcccatgtgtgccttttctacccattgggagaactgcagggtccctactaggtgcaatgtttatggtcatattcaaagttcttaatccagatcaagcttttgctgcaattgatctcccaattcttggtcttctttttgggacaatggttgttactgtttttcttgaaagagcagacatgttcaagtacttggggaaattgctctcttggaaaagccaaggaccaaaggacttactctgtagaatttgtttaatttcagctatatcaagtgcctttttcaccaatgacacatcttgtgttgtattgactgaatttgtgttgaaaatagcaaggcaacataacctcccaccttaccctttccttcttgcactagcttcaagtgctaatattggatcctcagcaaccccaattgggaacccccagaatctagttatagctattcaaggtaaaatatcatttgggagctttctcactggtattcttccagctatgcttgtaggagttgtggtgaatgttgtaattcttatagccatgtattggaaggtgttaactattcataaggatgaagaggatccaatttcagaagttgctgaagaggagtttgtttcccatcagttttctccagccacaatgtcacattgtgcatcctttaattctcatgaatgcaatgacagtctagaacctactaatggtcttcaaaacccttctcaagtacatcctatcagaaaccaaacaactccaagtgtaactgaagttcagatggttcttagtagcacaaaggattccacaacaaatgcatccaagatggggacaaatgatgcaaaggaggaaactaatccttcaaaagttgttgcaatagtagtagataaacctatagaagcacatgttatgcactcttcacaaggaaaggtggactatttgagaaaaaaatggaaaaggatagtgtggaaatcttgtgtttatgcaatcacgttgataatggtgattgcaatgcttcttggtgcaaatatggcatgggctgcaattgcagctgcaataactttggtggttcttgatttcaaagatgcagggccaagcatagacaaggtaatacttatatacaaaacctccttttatgtctcttccgtttgaaaagctattgttattattgtgtcaattgaactttgaacaatcacttatggtgattcttcttcttggaacaggtctcttattcactgttgatattcttttgtggaatgtttatcacagtagatggattcaagaaaactggaattccaggtgctctttgggacttaatggagccttattctcgaatagatcatgctagtggaatagctatactggctatagttatacttcttctatcaaatttggcttcaaatgtaccaactggtaagtggatgataacctgccaaaataaattatttttctcgtatgacttgctcagtgatcaagctagaaatttcatatattgtgagagaataatataacgtgcgcacacatacattttcatcaataaatccatccatgaacttacttatatgttccccatctattttacatgtttgttgcataattatacgaagcaatataataatattttaccttactcaaatttgggaggaggatcgcgaccatcatactttctaatagtttttaaaacaaactttctcttattatttgaaattcaagagggttccattacttcagtgacactcatatatatatgaatttcatccgataaaaaaaacgatgctaatatttttcagaacaagagtatttaaagcctagttggatacaaggttaaaagttcttttaagaatttctctattgaaaaaagctctatatttttagtagaagagatctcaaaagcacttgtgacttgtatccaaacagacccttagtaaatggtaaatcttcaaatgatttgtgttgtttatgatttatattgtttataagaatttttttttattaaattaatgaaataaaatattttacaatcatgtgtgagggtgtggaaatatgatatatttattttccccatgttttactaatcattattagttatagtactaaatatgttgcaatttttttaattaatttgagatttcattaaaattataagatgttcatccttatcaagagccattttcatctgatgtatcaaaacattctctttatgttttctagttctattgcttggagcacgagttgcagcctcagctgctactgtttccaaagaagatgagaagagagcatggctaatcttggcttgggtgagcaccatagcagggaacttttcactattaggatcagctgcaaacttggtagtgtgtgaacaagctcgcaaagctccaaacattggatacacgttaaccttttggacccacctaaaatttggccttccttccactcttatagtcactgctattgggttgacactcataaaatgataaaaaaaaaaaaaccctactaaatttttaagaatcctatcagagaaatttacaccagaaaaatcggtttattgtatataatatattctaaggctatgttagaaaagtttgtttaggaattatttaaaatttcaacttgtaaaataaatgtcagtttaggaattatgtgaaatattactaatacactgctttggttccttagttaactttctctatgatagctctagttagtgcactcacatcacatgttaccctttttcatctttatgtccctcgtgttgccatgatctgaaaagcttcttatcaaaggttagggggttggttttgaacatattttaagagattaaacgaagtaaacgtgtggataaacatgtccattctgtatctgtggattgtcaattgttgtatctactaacaatgctaattttaatttgccaatacaatattaacaaaataaaagttcataactagtcaaccttgatccaaaaaaacaagagtaaaaaacaattcgggaattattgagggtaataagtgcatgccaccttggattcattagtgaattcaccaaaaatattttatgatcgtaagcagagtataaggacccagcagtcaagattatcaactgcagatctgaaacctttaaactaaaggctctaaaatgaaggcaaattatatttcaaaatttagttttcagaatgtgattttaacattgtagaaacaaatttcagaatgtattttgcgggtaaaatatgtttttacttcatatacttggttgaatcttatttgttgttgtcgaaccaactttcatatcatgtaacttagtctctaaattttataaaagaaaaatgtatttttaatccatgagcttactttcaaatttctgtattatttttagcttcaggttgttagaaagtattaaaaacacgtttttttataaagtttagaattaaattgcataatataaaagtataaaagtttagagactaaaaataagattcaatataaagattaaaaagatattttatctgaattttgttatcgtaaccaaaaatataattccagattttagtctttaaaaaaatccaaaaaatgcatatagaaagtataagtttttttaaaaaaaagatgaatggaaaaaaacaagcccagatgtagactgaatcgggccacaaattaaaaaatatagcccaataactaaatccaatgctaataaaaaaaatattaataacatattttctatcacactttttttaatatattttattattaataattattaaaattataaaatcatggacatcttattcttaagctctggacacacattaggaagctgcattcgtggttggttcatattcataaagatgatttaccttaaaaaaaattgtttagaattctgattgtaattatatatacacatatttttctttttctttttcaccatgactttcatcacatatctattaaaaattattatttaatttttttcttttttattattttcatcatttagttatcatatttatgttttattttttttttctgtctaaataatcattaaatagaaaattagtacttgcaatcaatcttcgttggattattattttgaagttttcgccatattagtttattacctatgtgtcttaaatttaacaaatatatttttttgtaaaaaatgaatattttaaattcatcaagaaaaaatttaataaatggtttaattcattaatggtgtgcatgacatttgtcgcattttttaattagtagagggattttatctttttattttattaatcaatacatataattaatataattttaagatgatatgacaatatattatcatttttatcattataatgcatatttatggtaattattataaaatcgtcgttataaacaaaaaagttatcctaatgataaaaaattccataaaattaattatcatattatatatatcaaaattcatttaagatttaaaaattcaacttaataatctaatcataatatatatttattataatcaccttaattactataatcgataaaatttacacaaaaataaataaatatggtgatgttacatatcatttatcttattcataaaaccttttataataataacgagagtaatgacccgtattttgtaaggaaaaaaaaaaaacaaaacagtgatcagcgttttaaaatgcaaacgaaaaaaaagaagaagataaatatgcaccagataacacgtggagtttagtttcgaggctgaaagaatttattatatgtattgataataataataataataataataataataataataataataataataataataataataataatgtaatatctatcatataatttaaattctaatatgatttttttatttcatttaatttatgattaaataatattaaatgataacattattcatcatcagaaaaaaattataaatatcgacactaaattatatttatatttttttaataaaacagaaaattatatcgagattatgaagattaaacgaaaaattcaaaaatctgtttaattgattatacgacaattaactaacttgcaaaactatagttgtcataattttaaaatgaaaattattgtggatacgccggtgtgtgtatatcagtatatatatataaagagtttttttgtccgtaattaatggcatggcatggcattgaatttgaacataggaagtagacacgtgcatggttatgacttatgtgtagggcattggaccccacaattatacggaaggaaatgtggaaccatatggcacgtgggaggctgccttaagaacccgtggaatgtccgatacatctcccattgccttattcgcaactatgcaaattgcaaccaacaagattacatcttattgtgcctaatttgtctcattgcttaattctttattgttatttcaatttccatatactcaattctttatattattttgtgtttcttttcgcaatcaaactcctcctatcattatcatatatccaacattaagaagagtttgtcattcatccttgtttaactactactatacctatgacatccactaattttaatttcgatcttgttggaaagtgtctccttttttcctccttcaacattattgcaatatgtgttatttatacacctataacatgttattgttataaactattttttataatttaaatcaattaacacaattattaattattcataataattttattggtcaactttaatagaattgtctggtaagaaaaaatacatttgttttgtattgaagtaaaaatatgaaaaaaaaatcatgtaaaaattaaactctataattgattttctaagagaaagtaacatttttcttttttcccgttttgcgtccaaactcaatggaataacttaacatgattgtgtgacaaatttaaggaacacaatggcaccaattttgggcacagttgacgcctcaattgaattcgaagcaaacatcatgtaagattgtagcatcatgtactagagcatggaagattgcttgcgtaacacccttaaacttgcaacctctatcaatagtgaaaattccatttgcagcattactaacattaaccttgaatacacctatggtggttgctatatatccctgatactgcaaatatagcatgcccttgattgagttattacgtacgttggtgtgtgtatatatatatgtgtgtgtgtacttctaacttctttcaattcggttccataaaaatatagaaaagctaattagacagctaagtgcaagatttctcattatcccattccttaagtttttaccaaatatgccaaattcatacaaatatatgatatatcttctacaagaaacctctcttttgacttggaaattggaattggaagcttaatttaaaactaccacaaattctagttctccagatttggtcccaaaaatcttggattttcattttgccacatgatacaaaaacacactattagcgtaaattgtttctatatgaaaagaggtaatatatatatattaaaagatagagtaaattgtagtgctctcgaaaaatgcgagtattactactagctaacaccatcatcatcaatcatcatcatctcttgtgctaacatatatacaatttagtttattaaacttaatacttttttatatagaaacttaacatttttaacataaattattttctatcctttaaatatgcgagtattttttacagaaaaaaatgtgagtattataggaccgcttttatgttaaaatatagaataaattacacattattgccctaagaaataaaagtactcacattgttgaggtgtaaatactgagaaaattctattaattaaactaagacacaagattgagtacgtcattaactatataagagattcaatttggctaggaatctcttctacccagtacacgaaaaaagtcaacgaggcaagagagtgtgccactccatttccttccctcttagtgaatgataaaatcttgcaatgatcacctctcaacatgttatggcactcatccatcaggccaaacacattggtgtaatatcttaaaaattacagtttgtgtgcttgtgcgattaaattatgaaacaattgagattctttgttttaaataaataaatatgtgttttgagtaattaaatataattaatgattaattgagtaattaagaaaataatggaaattaattaaaataaatattacttcaaaatagctaggtagagatattgaaaaattgtgaagtcgttcaaaatttgaaaagtcaaagataattttttttggtcaaatagtgaaaaggagaggttttggtcaactcattaattatattatggtaaatatgcttaactttggtctaaaatagaaaattagaattttaatgaacattttttttactaatgagtttgtaatgactttaattagtgaaactatatgttctaagataattagtggcttggaaaatttaattaaagtctaatcacataaaattaagttttaaaatgaatatatatgtgtaatagaaataaaaacgaaattagacataacttatatgcaatgagagatatttatcaaataactttacgtacattgaataaattttttttttataaattcttttattctctcttatgaaattttaaaatttgataatcctaataaaattaagtagtataaatgaagtgtaattttactaagaattaaatatgattcacacaaagttattatagattctagaagaaagcctactatatactttagagaatgacaaaagattttttagctcttaaaaagtaataacaaaattgtaaatttgatccctcagtttatctccaattttggatttggtcccctagtaatttaattaacgaatttggtccccctattttgtaaaatcgtacaatgttgatctccaattggacattgacaattaacaagtaatgttgacggtcacgtgtcacgtttttattggatgatgactgtcacgtgtcatattctaattggtaaatgaaaacaacaatgcattttatctttcatggagttgacattcattcagaacatgacacgtgacagtcatcataacacgtgacagtaatgcatttcatcttttatagggggaccaaatccgtgaattaaattattgaggaaccaagtccgaaactggagataaattgagggaatcaaaaatgcaattttaccaaaagtaatctagcacatgttatgctaagttgttaattaacccacaaaataaaagttatacaggttaaataaaaataatttgagaatttttattatcaaaacaagtaactaatcgggtccacacaagttttattgtatgaatagtttcttcttgatacatgcttatacactctacatgctttttttcctttttgagaaatgaaaactttgggggagcatgacccctgtaggattgaacgtagttccgctcctaactaattatgcctaactagagactagcccacctatgtgttataaaaaagaatttagggatgtagtctaggtctagtcatttgagaatataagaagggagaaattagagagaaggagtgaaggaaaaccgcaataatcattgtcatagttgctcacatcctttgtagtggaaaataatttctcctttattcttatatgaatgacaatgaaccatggatagttcacatgactttaggtttattgaccttggacggattgtgaatatctcagaacacttgaatgagttaattaattgatagggtaatgatgattagtctgctatggtgttttgctctttttgatgttcttttgaaattaggggattgtgctttaagaatgattgataaattgatcactttggtgatttcataaagtatgaaaatgagttttcatagttacatgtaatatgatgttaatattggagtagaaaagagatgtgaagcgtgggaggcttcttccttcaaatattgcaacctgcaattatgcagaacacaatctgattcaacaccatgctaagaatgatgctagacctcatgtttattagtaacttattttatattttacttgtgggtttaatactgtgataagttatgatattgaggctagacctcatgtttatttacttgagattacattttaaatcttgttattattgtgttttggatttgtaaggcctttggaaagccaaaatcttatttacgttttacttttacctttttatgagatatttgaaatttgaagtatgccattttttttagacaaatttgaagcatgtgatgccttttatcaaataatttttttttggaaaatcctctttatttatttcactatatcttttaaataataatgaattcttttggggttaaagggtgtcccaagaaacaaatgagaatatttttttttgtttctatatactttctttgttcctttttaattgtcaaatttttgaattttttatatttatttattgtttgtaaagttcaaaaccacacctattactctttgctaattatccctttactttttacttaattttaaattaatttacacatatattgtagaatataaattaatgaaaaaagtaaaataagaaacccgtaattattttattagaataagctaatgtattacatttttggtttctatgtacaaaccttgaaagacaaacaaaaataatcttaagtagtataaaaaatatatgatcacttttaaatgaattaattactaattatttttcatatccttattttattgtgattatgaaataatcactcatttctaacgaaactggatccacttattaaactaatataaattatgttcattggttgaaaaattataccataaaatatattactctaagtaattttcattaattacaactaccagtctaccacttaaactatttaattttatggttatttctaaaataaattttaaatttatgatattactaattaaaattaattattttatggtctcatgaattaaatatttgtttattatacttagaatcgaagataaggaggtttagagtatgattaaaagcttataggtcccataaaaagtttatagattattttcttttgtttttttatttttttattcccaacagttgaataatttaaatttaaaattaattattataaatattttatatccattgttttgtaattttattataaaaaactaattactttagttaatccaatatatatatctaaatataaaacttattttactccatcaattatatctctaataaattattaaaattatctctaaaaataattcaaccaatgccatacttattattttaccattaaacctgtgctagtaaccttcaaggtaaggttccattccatcattcattgtctctgtctcttgagtaactcaggttacaaataactatgttcatgttcataaatatttaatttggtatacatattttattgaataattttatctttaaattattttttaaattttaattttttttctaatttgcattaatttttcattacttttatattattaattttttttattaactatatttaacttttattttttattatttacaaaatttagagacacactaacacccctattaaaaataatgataaaaaagtgtaacccagtaatctcttcggaaataatctccaatacattatttgtagtgttgtgcctttgtaataattttccaacagcaaaaaatgcaataaacacaatgtaataattaggttcataatttttaattattttgtgtgcaatttgttaattaaataattattattaactattaagaatcatcgctcaagagaccctctttttcgatgtcttagcacggagaaaaacacacactctctctctcctccttccgtacgcgatcttttcactatcttccaattcccaatttttcaccacacaccactgcaaatccttctccattttttcacattttgtttctgggttttttttttcctttttggggttctgagtggttcagaaaaaaaaatcccccccttttttgcttactctgattttagctaatatcacagtgtgggttgagctcagattcacggctaggagcaattcgaagtaagttttcacctttattgcattttgggtttgctctaatttcagtgaatgatgatcgagttggttgatttggctgtttttctgtgttcagtgttatgtgttggtggatgagtggatctgtgttttgatgtgattgtttttaacaatggggtggtggttccacttggggttaagagaaattttggtttagttaaagggtgtgcagttcaaagtttttttttttacttttttagtgggggtattggagcacactaaaagtaatccgtatatggagattagtttgattgggagatgggtttctaatgttttgactatccgtgtactaatttttatgtttttaatattttatatgcattatttttcttttttaggttagaacttaacaattgggatatattaaactttgtttctggaagttgcaaaataaggaatttgagctgatgtgaaggttagctgatggaattgttgatttttattattattcttggttaatacaaagtcgtgatggatcgggtgtatgatgtttctcttaccatgcactgtttgacaaacttatgaaaaaggtagataactagttgtagcgtaaactagcgaattgttgaattgttagcttatgctattattgcatctttctgcaatgtaccgtttaggatggtattgtcataggcttactggttaagaatagatgctcatgtagaagaatgtggatacagtaaggttgtgacaaacacacatcttgtttagcggttgaatatatgtgttattctctgttgcagggttttagcagccatttccagtcactaatttctgtctctgactctgaagtactgcttttggaattattggattcttcatttggtgaggattttggcaggaccataatgcttatagctccacctactgatgtgaaatgatagatatttcgaactattaatggcattcatttaagcaacttgtttgcctcattgcaatatacaaagtacaactatgccttcatggtggggaaaatcatcatcaaccaagaagaaagcaaataaggaaagttttattgatgcatttcaccgaaaatttaaaatcccatccgaaggtaaaccaagcggtagatctggaggatctcgtagacattgcgatgattcaatttcagagaaaggggctcagtctcctcctgaatcaagatctccttctccttccaaggtgggaaggtgtcaaagctttgttgaaaggcctcatgctcagccactaccacttcctggcttgcacccatcaaatataagccgagcagattccgaaattagtataccatcatctagaagaagacatggaaagggctccaaatcatcgttgtttcttccactaccaaaaccagcgtgcatgcgtggtaggttgaaccctgctgagttggatggagatttggtcacggcttcagtctctagtgagagctctgctgatagtgatgaaccagtggactctcacaatcgtagtcctctggcaactgactgtgaaactgggactagaactgctgcaggcagtccctccaggtatactctacaagtattcatgatagtgtgcttcaggattgcatattttgttgtatatgcatgcctaggttatctattgttagagaatagagatgtaattgtttaatataaaatcattaatgtgccttcacctaaaagcttaagcttttgggatagttggttcatggcatggtatcaaagcctctcagttcaatacttgctgttcccattctttaaaaagtaaaatttcagcacatggtaggtggaccagtgcattatccacactttaagttcaatgggctcttatccaagggtgtgtattagagatataatgtgaaatcattcatgtatcttcacataaattttaagcttttgagatagttggttcatgacatttatgattacttgcaaataatttactttactcatttttggatgttggccttttcatgaagcttgatgcagaaggatcaatcatctactgtttcccaaataaactcaagggaagccaaaaaaccggcaaatattctgggtaatcatatgtcttctacttcaccaaaacgtaggcccttaagcaaccatgttacaaatctgcagattcctcctcatggtgccttcttcagtgcgcctgacagttcaagatcaagtccatcaagaagtccattgagagcatttggtaccgaacaggtgttgaactctgctttttgggccgggaagccatatccagaggtcaattttggtggatctggccactgctcaagtcctggttctggtcacaattctgggcataattcaatgggaggggacatgtcaggacagttattttggcaacctagcaggggtagcccagaatattcccccgtacctagtcccagaatgactagccctggtccaagctctagaattcagagtggagctgttacacctattcatccaagagctgggggaacacccaatgaatcacagacaggaaggattgatgatgtaaaaccacagagtcatcgtttgccccttcctcccttagcagttacaaatactttgcctttctctcattcaaattctgcagcaacttctccatctatgccaagaagtccaggaagagcagataatccaattagccctggatcacgttggaaaaaaggaaagctgcttggcagaggcacatttggacatgtctatgttggctttaataagtatgtgcttttgaccagaagttcttgattatattatgaagaaatcttttttctacttttaaatccattagtgtatgcatcttataaattgtttggttaaaatgttgttatgtgtagggaaagtggtgaaatgtgtgctatgaaagaggtaactcttttttcagatgatgccaaatctaaagagagtgctaagcaattaatgcaggtaaatagatttcctttttgacctttgaaatttttttgtgggactgaatagatttcctttttgacctttgtgcaatatgtcagtatctatttctgtttcaaatttggtgtagctttgaaaatctaactcccagattctggcaggaaattaccttgttgagccggttacgacatccaaatattgtgcagtattatggttctgaaacagtaagctctccaattcctgtttctttctcagtctcctgtttacattagctgtttgtgagtgatcatggatttattttgggatttatctgcagactgccaatttctaatgtttgcatgatcaaatagttacaagattattagttgctagtggtttacatttttacttgtcatcattatattagatacttgtttacagtatttgtcttttcagtctactcatagaaactgccaaatcatcccttaaacaggtaggcgacaagctttacatatatctggagtatgttgctggaggctccatatataaacttcttcaagaatatggacaatttggtgaactagctattcgtagttatactcaacaaattttgtcaggacttgcttatttacatgctaaaaatactgtccacaggtagacagagtcacttgttcatttttaaaactttgaattttactgcttcctcataatgattaatttttatacttcagagtcctgatatatatctatcacttaattgcatttcttgtaaagggacatcaaaggagcaaatatactggtagatactaatggccgggttaagttggcagactttggcatggcaaagcatgtaagcttggagataaaagttatccttttaatttgcatttaagctaattgtaggatatgaaaattggtttctgttgcttagtgaaattatgaataaaggtttaaaaataactaattcactgactcaagggagttgctatttctaattcagtggggtttattcatgttcctttctcattttttctcttccctttttggaggatatctttcgtgtcccaactccttccagtttatcatgtatgacttcaatttgaaaaaagatcactatgaatccaaaagacaaataactaccttcggttcttttggttttatcgagttcatgagatattgtttccatgcataattgccatatgatatcacatctgttttaaataatcataagattgcatgatctatcctgtttccccaaatattaacttgcatattttgcagataacagggcaatcatgtccattatcattcaagggaagcccttattggatggctcctgaggttgtaatattttctctgttagttttggtcctttatagattcaattacatcttggttttgtgactttatagctttgctttctgatttttcaggttataaaaaactctaatggttgcaacctagctgttgatatatggagccttggatgcacagttttggaaatggctacaactaaacctccttggagtcagtatgaaggggttcgtaatttatatcaatatattggaatttggaacttgttagttttttcttgtttcctattattttatgtagtttgttcttttcatttataaagtactgattctatttcttgtattaatttatgccttgacatgatgtattattgtctatgcatgttaatgtaacaggttgctgccatgtttaagattggtaatagcaaggaactcccaacaatcccagatcatctctccagtgaaggaaaggattttgttaggaaatgcctacaacgtaatccacacaatcgcccttcagccagtgaattattggaccacccttttgtaaaatgtgctgcacctttagaaagacctattctgggtcctgagtctccttcagacccagcaccagcagtatcggggatcacacaaggagcgacagcttcggtaggaagctatttcaaacataaatcttataaaaagttttttgtgtctttctatattcttagtgtgaagtgggatagcctgtttgtcatgcattgaatatctcattcttgtgtcaaatattcttagtgtgaagtaggaagcttctttagtgtgaagtgggatagcctgttgtgtcatgcatggcatatctcattcttgtgtcaaatattcttagtgtgaagtaggaagctcctttagtgtgaagtgggatagcctgtgaagcggaataaattaggaagccatctgctctgctacatgaaaatgtgatgagaattttgtgaaattcatgcattcaaattccttttgattgctgaaccatttttctggctatgtattttgtattgactataaacattagacaattcattctcttggaaatacaaacttgaataattgaatctattggagaccataatattgggggacaaaggcatgatatttattctcatcccttgtccatttatgttgccatagaaattgattttacatatttttgttaggcagcatgaacgatcagatggaatgggcagggacagtagcttggaccagattcaatgttgagggatttagaacagatcaaactttctaggtttagaaccccctcagctctgaaatccactggattataaagaaatttctaatatttattgatgaaaaataatttctaaaccattttacagatagtggcctttatatagacatgatacaactttgttgactcttctaggacttcccaattcatattgtaatttaccatcataattacctttattatctaaattaagttttaataaaatccaaaaaacaaattcctagaaaaaaaatactgaaatattcaaaattaaacatcactaaaaatataattgacctttctttgtcctgcatcaataaattttctattttgatatcatgaccggctgtataaaacttatctttgaagttttttttttttttccccagtatctatcagttgtaagatactggaaaattttgcctgcataatggaatgatctttgaagttggttttgttttattgtttctcctctaccctcttataattattgtggaaatttaattcatctgtgataaattttcagggcattgggcaaggaaggaatccgtccaagttggattcagatcgactttctcttcattcttctaggtttttgaaaactaatccccatgcaaggtttctttctctctctctctctctctctgtcacacacacacacacactgcacacacaaggttgctggcactaccaatggtggtctgaaattaattcatttatctccagtgaaatccatattccaaggaatatatcttgccctgtttcacccattggaagcccacttttgaggccaagatcaccacaacacatgaatgggcgaatgtctccctctcctatatctagccctcggactgcttctggtgcatccacgcctcttaatggtggtagcggtgccattccatttagtaatcacttagtttacattcaagagggtcttggaaacttgccaaaatcttcaaatggtgtctacgttagtggccctgctcatcatgacttgaatgttgacatttttcgaggaatgcaacagacatctcacattacatcagaactggttccaagtgaaagtgatgttctggggaagcagtttgcacggactcctcataatgagccgtatgatgttcaatcagtcttggctgaccgtgtttgccggcagctgctgggggataatgtgaaaattaaccaatgccttgatctaagtcccaactctttgctcagccgggctaatggtttatgacatggagcatttcccttggcccactttttgagcaagtctttgatgtttgtcagaatgatccatttattgttctatttctgaggaagtaattgtaaaataaggagccaaagcataggagaatcgatgaaataaattttgatctaagaatagaggagctggggcacttaattccgttctgcatggcttcaggctcaggcattgtggagttcagaacctttaagttgaagtaccaaactaagccatacgatgaaacttcctgacatttgatttgtctatatcaactgaagcaaatgctcactggttgctaaaagaggagcttatgtttgtatgtagaattttcaagatgcagcatcagtgcatgctaagtagggagcttggatttctctctggtacctaagatatgagaatgataggattaatgttaatattaactcaaggaatgacttcttctaatcatatgtatgcagttccttcagttaaagaatttatgcaatgacaactgtttcttttagaacatcatatagatgccaaaaaaaaagtgaaattggtacaaaatttagcttctagactattttttgggaggtgatgttgctgtacagaatatgggagactgtattgtgattctgcatttattgatgagaagccaaggatttgtggaacccatatatctcttgattgcatggtcagatgtattactgtcattatatacccttctgctggatttattttgtacattattatttgaagtaaaaaattgaagatatatgatttgtgatcctctcggtttatgcagtgcttatctgatgggatcaacctttctattattatttttcctagtgattcatgcatgagctcagtgcttataggcacaattaatcaaaaggacacgatgtattaaaatgaacataaagtcttgtgaattttgtgttggaattattttattagcttgaacttttgattggtttatctatacatattgttttgatgcaagaatttttcctataaaatactttaaggctattggcaactcctcacttaattaggtagttgggacattaaacagtttgctgtggcaggttgatccccagaatatccctgctgtacgttaagccactaactatattaggataatggtgagggggtttaaatctttgttattctttgaaggtttaaatgtatttaatttctaaagatatgattattgtctaaataaaaacttaagttgtttaattccttaaaattataaaatattggtcttaatcttcataaaagattaaaatgatatcaattctgctaaatgtgaggattaaaaatcttttttttttttttatcaaaaaaataaaactgaactcatttttatggatcataaacatataagtgttaatgatgtatctcaaaccatgccaaataatgtaataaatacaattttccttttcaatgaattgcgatgttccatcacaaacctccattttcatgtggatatagattttagtgtgttgcagcaagcaatgataaaattaattttgattaaaattaattttaaagtgtaatttatatttagatgtatttatttttaaaacaagttaatgctaaaacttagtataaattttgatccgacagaaaaattatataaaattacttcaactcgatcaattgcttaatgtaaaatcaaagatgaacttttacctgaaattacattaattaatttttcaacatgattctagtaagccaacatgaagccattcacagtcatctaacagtatcaagataccaaaatcttacatgacgtaccaaaaaggatgatatgaacaacctcgttagtgtaaaccaatacgttcagcaatatcataacagtaaaatcccacggactaaaagaattttaatcaatattcttaaggcattggttaagaaagaaacaaaaagaataatctttttttattaaaatgtgtaaaattacactgcatataacatttcttacgctcatttatgatttttccaataaatattttctaaaagattagcaagatcctatatataaacatggcaccattagtggaaaaaattggcaaaaattaaggaagtcatttgttaaaaagggtttcaagattaatgttaaaaatatccctcataaaatgaagattcttaattggagaatctgtagaaatagccttccatcaagacaaaagttgggtgaccaagggagaatgcatgccctatttatttttcactttgcaatacgggtattaaaaatgagtggcactttttttcttttttttttccgttgtgactgatcatgctgtcttggtctggatggaatctggtttttaatttggcaattaatcaggaatgctgagtaaggagttacagaatgcattttcagtttgcttggcactttgcaaattgatttaaaggagaaatttgcaactatattaattatggtgtctttagagaaggagaaatgaatagctgtttgggagtatatatatatatatatatatatatatatatatatatatatatatatatatataaagccaattcctatctctatccatgtgtctgttcgagctctttatgattggaaatatgctcaaggacgaattaaaacataatccaaatactaggagcggacctaatgcatgcttgtttgtggaagaaattaacctcaaggctacgtagcatgcaatgcaatattgacgcattctttattcatatggcctctgttggaagttcaaacaacacagaaattaacctcaagtgcagattgaagctcattaatgtccaaaactattcagttagtttcattgaaagacaaactaatcaagtcgttcattgtttagtaagggagtctagattttatgcaaataatcatgtttttattttgagtccatcttgtatgcattcatacaataatatgagtttcttccttttgacaaaaaaaataaatagattgcccaaacaataccattatctaattaaccatatatcaacacgaacttaaaataccataaactaatcttacaaaatgtgaaaattacacaaggattattaaattaaaaggttacgtgagtactttttcccaataaaataaaagccttttctttttataaaacttaaacaaattatttcgccaacataaaacatgggcaaacatggctcatcatcacaaccttttttccttgtttcgactatattaatatgtcataatattttgaataccaacaagattttgcaacaatatttaaatatatacatgtaattgacgtaaaaaagtgttagaaacacattttttcaaacgctctcactaataggcttaaatttatcgaaatttataaaattaagaaagaaaaaatattaaatatgatataagatttacaaaatttttattattttcaataaatttcaatcaataaaaagaaaatatattttaaaaagtatgtctgaaaatatgttactaatatttctcataaaagaaaatttcatgcttgtactacaggcactaattaaattgtaagcttgaacaacacaactctcttaaaaaaattagtaacacatagattaacagtcattatatcattggtatttttattcagtaatacaattcgcatagacaattaccacatgtattttacttggtcaaatttatgctaaaatcccacaacttcttggctaaatccacgtcccttccatgtgagtatacttccgcaagattattatcagcaaaatgtttgccgttgattccactcacttgggggtgcaaggctacataacatgttgttgatgctccctacatgtcagggtgtacaaagtgaatatatacggaagataaggagaatcacatgttaaatatgagtttattttattttatttttattttacctcttttcagtcctttggattaaataacaaaaggaattatcatgatatatgtatatgtgtaattaaatatattttttttacccacaatgtaccatttccccctcaattttactctatagtttttgttttgtttttaatccttaaaaattacaaaaataattatgattttaatcaccggtaagtgaccaaagttactttatttttgttaaatataaagaatatatagttttttaaagataaaagaaaaaacatcatatttttcacaacaaaaatatatttaaatctacttatattcatgaaatgtagtgattaatttaacttacttgctgcacatttttcgccataagtcccagtatcttctcgacgccaaatagccttacaattttgactaaacctacataaatcatataaagatatgcccataaaacttggtacatatcattaatgttgcaactaagtgatataaacagatatcacgatggttgatattgcaattaagtaatataaactacaaaggttgcctctaggtgatatcatgaaatagtttttgaaagatgcttgaaggaataatgctatctactaagtttggtgaatttattatatagaacaaccaatccatttaacacaattatttttaaataaagatttatgtacaaatgtattcggataaacttttctaaaattataggagaagaaaataaaataaaatttgaaataagcattccataaactaaagtagttcatgtattataaactgattttaagagttctctcacattaacttcttcgaaagcttatttttaacttataaataaactaatttaacttannnnnnnnnnnnnnnnnnnnnnnnnnnnnnnnnnnnnnnnnnnnnnnnnnnnnnnnnnnnnnnnnnnnnnnnnnnnnnnnnnnnnnnnnnnnnnnnnnnnttgaacaagagctgtttagtttgagaaaacattttctattgtgcatttttaattacaaaaatgtcacattaatatctttaaatttgtatctttttttatatagtttcttatacattttttttaaaaaaggaaacaaagtgaaaataaagtggtatttttgtaattaaaattaaaactattttttatgctgtctctaaaataattcaaattttctgatgattgtgattgctagaagtttcaagattaactatatgacaaggaatacgtagtttaggcatctagctcctaaatcctaatttgactacaaaccctactcaaaccaaggacttgtaaaacttggtagctactataataattgtaaaattttgctaaataattgtttgcaatcatctagtaaaaaagattggcaatgtcaataagtaatattttttttttttgaaaggtcaaatgaatttcataaattaaggaagaaaatataactattacatgagttgtgctaaagttcagtaatcaaatgtcaagtacaagaaccaaggaacataaacactagtaaaattagattgctagaaaaaagcaaatatattcaaactcatatattgtacttaatttatgtttattcgcaatgagtggttgtttcaattaggttttaaccacttatctagcctacgctaaatggcctttactaattaaacatagaagtaggtcatgccataatttggaaatatttatttagaagtactagttccttaattaaataatggaagcatgatagagaaagcaaagaacaaatgtaagataaggtatatcgacctcttagtaattagccaaaggtaaggtttagaaaaatcaacagtggtggtaatgtttattataatggccttatggtaaaaaaaaaaagtctaaaattattaaccaactcataacaatgaaataataaattactcgttgtggggcaaccttgagacgccttgccagttcattggcatgcaaaatattagcaagctttgattgtccatatgcacaccaattgttgtaactgtaaataaggaagcaaataaattatgcaaaacaattagattttgcagacgtgctatagttcttaattgtgtatatgtaaaataaagatattttaaaaatgataaccatcataaaatgggatcttttatgttaagtcatcaacaaaatatatttaacaataaagtggaagtatattcgatttcatgaataatatgatgttggaatttctaagttcttaatcttctagctagtcttttatacacaatatataccggagaataaagagactcttctatttttttatgatgaaatatggaaaaagagcatcgtttatataacttgaagatgacaacccttttataaagtacataatatttaatgaaaagtaacgacttttgaacttttcttatttttattttagtacatcataaaaataagactttttgtgtctccctgttacaaaactcatcatctaattaatgacaacaatttcagtgataaaaaaattccttataagatcatctcaaaaggaacaacttataatgtttgattaattatataagtctggtcattaaataaatatcaaacaaaattccattttgcctaaaaaaattccatttaggccacatctatcattattcaatcatgtagacgctaaaaaaaatgtcatcattactctaataatttgaacactatcctccatacatacacacatatatatatatatatatatatatatatatatatatatatatatatatatatatatatatatatatatatatatatatatatagtttaaacttagaaaattgttcagaaacaagatagtttaaaatccaaaaattattaatcaaattaaagaaaactcaagcaatcataacaatttttttaatgatttgatagaaaatggatttggttggtaccatttgtttaaaataaaagggaggtataaagatgataactaaatctatgaagaatgtgatgaaatttgtgagttccatatctgttcccatagtttatatgcataattctctcttagagaatatgaaatctcttctaatgattggatgttaaaaaagaaagctattcctataacttagagttaatatatagcttttttatattaagtttttattctcttgagaaatataataacttttaaacttttccttttttatatagaaatattacatctacaaaatgttttcacaatttattataaataatttttctctgtttctctatatctcatttcatctcacattctctgttcttttcctatttgtctccctttgtttataatatatcttgtgaatttttgttgtatgaataatactatctttttattgatccatagtataaaaatagaaataagactcttcctattgaatggaatatagttaattcttaatactttataaaaaacttataatgcataattggttatatatatatatatataaaatttgttagtgcatcagtaactaatatcataaattcaataacccactcaattttttctataagttaatttatgaatatttattgtactttatcatttactttttaaataaaaaataaaaaaattatttctctctcttattccacatgttttctctcctctctccttctataagttacaaaactttctttctctctccatgttattgatgggatcctccatctttatctctttctctccatatcggttggcatggtggtgggagaggaggtgttgtaacatgattttctgatgcatgagaaaaaaaaaaccttgaaaaaaatttaatgtcgatcaacacgagggagtgtagtgctaaaaaaaatctattatttcatttttctccaacattgtttactggccatggccactcatcttctaggttacccgtgatccaacaaagaagccttattaacttttttaaaataggaagtcaatggtggacatgtctttgatcaacgcattttttaaaataaaacattcaattagtataataaccttaaaataaattaataaaataaaagatatgttggattttttgtgttaaagatatctaatactaaatgcaacatacttttatatccaagtgcatcagatcttatcaattattttttgtatagatacttaatttgacattctaattatgagtgatagaccatttcatacacattatatttatgtaaaaccttatattacatatatctataaataatatcataaactaaagtttgacaataatatttatcatttcaagagttgaacaaaaatattagagccaaattgttagtaaaaaaattgaagtctctagcataattgttcttttgataaattcttagaagagggaggcttcataaacattttttccatgaaaaagaatatggtagaataatttacaatcatagatattatatttggtatattttttaccttgactggtcattaattttgtcaaaaaggattccttcatgatatgtgaatcgataaccaattgatgagacattaacaattcttccttgtttcttactttcacttgttgttttcttcatagtatccaacaacgcatttgttaaaagaaaatgacctgtggaattatgttgtagaaaaactaaaagattaaaattattttgacattttcttggcctatgttttaatctaaataataaaagaaatatttgacaatttatggaaaatcattagtgtaaatactctgcacataattatatgcaacaattatttataaccttttcgcacgactaagatacatgcatgtacatgcacatgcgtgcacatacacatgtaaaaagaaaggtgtcacatgtgtatgtctcttcctaagacacacacaaacggacacacatatgaatatgcgcattacctactaaagatacatcacatgcgtgtaggtacaacatgtgtacaaatacacacatataaaagataggttttgcataattaagcaacatacatgagcatgcatgcatcactaatagaaaacacacaaatagagattttaggtttctatgctacttcatgagatgcaccacccacacatatgcacacacataccatgaataaatatgtttcacatgtgtatgctactacataagacactcaaatccatgaacaaatgcacacaccacccaaccaagacatacttataaaaaattgttatggaattagatagtttcaacatacctatgtaatttatggcaaattgaagttcaatgttatccttggatagtgcaaaaggggcagcacaaattcctgcattgtttctttgaattacaaaaaataaaaaattacacaacattataattaaattgtttgtgagaatggtagagataagatgtgtgcacttaaagagagagagagagatgtacaattatattgaacacacataaaaaattgacaatgtagcccatgcattcttacatcaaaatattcaatgaaagaccatatgaattgaactttgaagcaaaattccggatagatgtcatagaactaagatctagctccatgacatcaactttagctgtgggaacctccttaagtattgcttccttaacagtttttgcaccaatcatatctatcacccccataatcacatggacatcacgcaaagcaagaacacgagcagtctcagcaccaagaccactcgatgctcatgtcaatcaaatataagatgcaagtttgtaaaaacaaacggaaaattttatagagtttcatatttgtttaaaagtgtgcaagtattaggataaagtataagtattttttttaagagtttgaaaactttgggaattaaaacaaattaaagtatagttaaggttagttatggtttcctctttttgcaatcaagtaaaatgtaacactgatgggacgactaagggctctcttggggcaacttactatggaggaatattaacagagaactttgttgccattcttggattctttgctatgaatcttggtatcaataatgtaattttggggaattggttgatgcagtgaaggccattgattttgctaatgaaaatggatggttaaacttgcggctagaatgcaatttcatgttggtcactaaagcttttcagaatgatagaagattagttcctaggaaaaatagaaaaaaagtagaagaaatgcatagcttttaccaaacatatgaatctttttgtcagtcatatttatcgtgagggcaatacttatgaaattaagctagcctcacatggtacaacttagaatagagtgatcacttgagaagttttcaaagagattttcttggaaaagcaccttcatgaggacatttagaatcacaagaagactgagttcttggaactcaagcatggaaacatgattgtggccaactatttggtcaactttgatgaactacccaaagtgtgttaagtttgttaatcacttgccacataagatcatacaatccattaactacctgtagattcactagtttcttatactataagagtgtgggcccaatgaagaagatgtttggtgctcaaagtcattgaaagtcattataacatatttttttaatttattattcaagtgatttaattaaattataagagaaattaaatttagtttaagtacttgaatgaattaattaataaatttggtgatttgattttatgtgtgtatgtggctagtgagttttaatattttgggcttaagaggatggattttagtttatatttggagggacaggtgtgtatagtaaagtttatgtgtgaaaaaggaggaattacaagagtcataaactcttcttcaactctaaaaaatcttaaacgcaaacacaaaagttctcattctattctcttatttctcttcaagaaaacaaattctttgaagaattgagaacttggttttcttgctcaaaggagatcttttccttctctatttagtgttcattggttgttcctttttgtgataaacacccttccttcctcttttatattccattttcgtttttcactagggcacccacgaaggtttcatggaaaagacttagtttttagttttgaatctgactttgggttgattttgggtatggataatgcccttatagtttgaattgttagtggagttgaagaaaacttcctccttggatccaaagttccctcttttcttcctttgtttcatctcaaagcaagttccttgggttttatagatacgaaaaactttatccttttcaatgcttcggttgttttgaattggtttcgaggttacttaaaaatgaatcatgttgttaaaaatggaagtttgagcatttgaggttttaagttttaaaatttaggttgttgatcatttgatgaatattgattttttgttgtttaagtatttggaattgatggaaaaaagtttgagtttgttttgggatgatttggaagccaagaaagacaattctacagaaattttgaaattctagaaaatttgcatctagtgaccattttcacgtccaatgtccagtgaacattttcatgtccaatttccaatgactatttttgcatccagcgtccaatgtcacgactaataaccattttgagtccagtgatcagtttttgagtccaatgatcagttttgatataaatgtgattaatgtttgttttccttgcataaatgaactattttgagatcttaaggaattatgataatatgatatacggttgagatgatgttattttattattagagttaactttatgttgagataatgagattcacattcaaatgagtttttagtgagttgtttgcatgaatgtcttgctatacttattgaactatatgtggtcatgagtgcgataaatgaatgaaaggtgaatctatgatgctataacttcttatggtgttgaggttggtgaatgaatttgtgatgacatttgatattgatttgaatgatcataacatatatgcattgatgaatgacattgcatgagagtaagcacgttggagttgctaagaagacccttaacctagtgttagagattgtcatggtgactaacgttgaatagacctataaaatggataggtgaacaaatccctagatagattaaggtctttgcaagtcttatctagataagttactacctacgcttatctattttcaataaaaccatacttcttctatagggttaattcaagtcttttcgaatggtcagatcataaaatgtgactatgttaaaggatgcattagggttaatcattcaaaaggtgaaatctttcataagtaaagagttagcaagacataacatgatagttagacatgtttattgataagtgtgacttgagaatgatgtattacttaaggagttgtattaatacatgactgttaaaaaaatgaagaatttctatacctcttttaacatactaatgttatatatttttttatatgttgttttctttcaaaatgagattacccttaggttagaatatgggttgaataggtgacctataatatatatatatcacctttagaaaagaaaaacattgagaaagacaaagaaaaaagtgacctgtaacaatagcagtgagaccacttccatcgattccatgagtaacttccttggcagtagaatatgatgaaaacccagaagctcctattctgctgaatggccaccccatcgtttgtttgttcttttcttttctttttctgtgttcttccaactcagtttttttgtctagtaatagactgcaagaaatctagtattatataatcagtggcttatctggaccacgttgaatcttgatatacaaccccacatcattttgacttaacactaggttgttatagttttaattatttttcgtttgtgaggatagtttttgatatatacttattttttaaaatcaatatacataattaagtaattaaaaatgttaaattaaaatagattatgtaattattaaaattttaaaaattatcattctttgttgaaaatacttgatttaaatcttaagtagtataatttaaaaagataaagacatgcacttattaaattttcttttaaaattattgaagctaaattttaatttctccaatccccccgcaaaaaaaaaaggatcatattagcgattaagatttagcaggtggaatgaaatttcagaggttcctatctaggtcatacaaattgataattcatatcataataaaaaattaatgtgatgagaaacttttgtttgttctatttctgtatttcccttcaatattccagttattttgtgagacacgatataatgcttggggcagtgctggagcttgaaacaaaaaattgggagtcaaaaataagattggaatgaaaaaaatattcatagatttttcattttataatctcatctaaatttttttaatattttttaaaaaaaatcttaaaataacttatcatgcaataattttttactaattaagttattcaacccatcatatcaatatcaagtaaagataattatatttttaaaaagttaagtgcgagaatctaagaactaagaagaaaaaaaaagaataaatcatcaatttcatatataaagtattactttctcttttaaataatcactaaagtaaacccttaaggattagaaatcatactaaatcattaaatattaaatattcacatatgaactaaattaatgaatattcatcatcattgattatatgactcatttaatttttatttttcattctcttataaaatatctctttcattatatatgtccatcaatcttgacatcacaaaaggaacctcaaacccacacatgcatgatcatgaaagttcttgagtcactcatccatgatctcacacatcattaataatggacgtacttaactcatcctaataattaagcatttactcatcattcaccaggactaacgaaccaaccccacacagacccatgtcctgtacctaaacattaaatctttcaccatatcttccttcaaatcaagattggcatttctcttggtccagcaaaacacacctatacatgaataatttttcaaaagtttggggaggtcatggcttcgctgctccccaagtggctccgcccataactgctgacatcaaatgtgataaattacttttagagtgcatttagatattggattttaactaaggaaattaatttattaaagaatttgaatttttaatctaaaatttattgtttgaatgtttttttttgaagaatttaaaaatttgaaattttaaaacagaattttaaataattaaaaattaaaaattttaatttccttatgagaaattaaaattctcttcttatattctttttcaagaaacaccctctgagctcgtgtaacatcaatcaggtgtgagtgtagagaaatacgtataactagcacatcaaccacatgttctctctttttttcattcatttttttcaccctcataattttaattttttttatccaaacacaaaattttaaaaataaaacaatttcaattgaaatatttgaaattcttaaaatttaaaatttctcgaaatttaaaatttccccatccaaacacactcttaggcaaatgctaaaaaatgttcttaaaacattagttaagaaattaaaaagaattgtttttattgaaaaacacaaaattgcgttattcataatttttttatatttttccatgatttttataataaatattttttgttttattttcttaaccaatagactaaaaacattggttagcaataccttagattacttttatatgcaaatgttaatttttaatttttcatattacatgactaacaataagtagctgttaatactctttaattttatcttcccaaccacctttttttgctgtaacgttattacttagcctatttgacaatatttttttttctgcaagtcaattttaatatcacgtgactaataataagtggctggtaatgctcttttatcttctcaattaccttttttttttttcggaaatgagattaactagcccacttcacaatatttttttaatgcaaatatcaaatgggatcttactattgtcatggctaatggttcctatcaagaggttgacacattttttttctttctaatttttttttcatgaaatacaattttttataccatcgcacaagagaatcgtatttctagtatgtgatagaatgtgaataaatctgagttgggtcctaaattagttgatgcttgtaggaggataatgatccgtaatccaacctttaagatataggttttggtaagagaggcaagctaatgggatacttcatgagttagtcagggtaatttcatttcatttttatcttagtcactatacgtttaatctagttattccatatatgtgttgaacaacttattttaaatgaaataatatgagagtatattctagcaaaagaaatcattatcatccaaattgatggttcttgtcataatcagaataaaattaatactatgatggaaatcgactttttagttcaacattacagttacatgcttgtagcaataccattattaattgatctggttcgagacaagaaagtcccttcatttaaccaacggccaactcctttctaccttctcaacaaccctactaaattcgtgtccttttcaattaatattttcaaaaatattttaatgttcacataaaaaattcttttagtgcagaaatcaagaaaaagtgaataattcatattttaaacaataattaaactaaagtagaagatagtttgtgagaaaaatattatatataaaaataaatgatacaatgatttgttagacttcgtccttatttcttaacatatgaataaaacactatctgacacatctttttctcgtcttttttttatatttaaaagacgagaaaaatagttaaaatataagaagtgcttaaatttttaatatatcaaactatttacttttaattaagtatttctttatttttaactaaaattgaaatactcaattaaggaattaaaatactattataaaattaatatacgtattattttagtgaataagtaaaactatgtttttaattaatgtttttaaaagtaaaataatcattagacgatgtgtgtgtatggcaaggtaataatagaataaagtttgagtttctatgctgcttcgaataatttggagattttgatactattaattttttaatcaattaaattacatgttatctttttattaattattttttaaaattattccttgattattattttttaaaattttaaagtagaaaatattattacaaataactttcgaagtctgaatcctaaaatttttttagttacttttaacagtttttataaaaaaaatattgatagtatcgaaatattttagcatttagagttttaaaattatctttagtcatattttataatttaaaaagtataaattttaaaaaataatcaagaactaatttaaaaaataaaaataataagtaatgagaaaatgacataatttgattggttaaaaaatcaatagtatcaaaactcctcaaattatggggatcaccataaatgctcttataaaatttcttatttgtataaaaataagacttaaataaatggttgcttttaaaaaaatggttagtcattgaaaatatattatactttaaaattagtctttaagagattaaaactgcattattttttcaaattagggacttaaaaatatatagtttaaactttcaagtaaataattcaaactatagaggtcaattaatcactactcaaaagctcattcattcaaattttaaaaatttgtatcaacagtgtttttttttggtacagtacgaaaataagcatatctatggttgtttaattaaaagagtgaaaaactttttctcctttagaataaacactaatttatagtaaattagcttatttctcgatacttggatattaaatttatatttaagtttaatatttatgcactgacactataaaatagttttatatttttattcaatcacaaatcatcattaattattttatgataattaattattttaaaagtagaaaaatttatcgtatataatagattatgattagatgattgtatataacttttaatactatcaatttattatctttttctattcatattttataatttataggagtaatttttatattatttgaatttttaatatattttatttagtttaaattttaataaatgtacgtttatatatatatatatatatatatatatatatatatatatatatatatatatatcaataaatatttaaatatattttatacacacttgtgatgaatttaattttttttaaataataatacagaataattaatgttgatttaaattattttattggacaatcattaaaatggcacactagggttattcaattcgaatcaaattgaatcgaactatgttgaactacaaatgcaattcgcgtgaaccaaactgaacagtcaagtagtttacataaactgaatcgaactgttttaaaaatgtattaaactggaatgaaccggtttaaattgaactattatgaactgtttttaactgtaccaacttattttcaatggtttttttatatagaaaatactttttcttttgcttttaattaaaaaatacaacattattttagttggcttctcatttttacattgatttgtgtttgaataaataagtaatgcttttttttatatgattgtgaattttcaaattgctatgaacaaaatattaaagataagtttgagcatttttaaatttaagatcaacatatttgaaaattgcttatggaggccacacgagacaatatttgcttttaagtgttgcatcttatttagccaactaattgtcatatttaggttgatttacatgtggctaatatatactaaaaatatgaagaaacaaatgtttggcacgatttcattctcctagcctgattggtgggatgttaggagccagaggaagaagataatgccttggtttgaggtcaaggtccctcctagactaaactaactttttacttgaattttgttctctgctttttattcatgcatgcgatatctttatatacaattgggtttacactgctacaacccgtaattaactttttgcagtaccttctaacagtttaaatgccattgcaattaactaacagcttgtaactaactaatagccatgcatgcagctttacacgtaattctctaagtatttggagtgcgtgatgttccttggtggcctttcctcacgtgcttctggtattaacgaagtgtcttcccctttctctctgttgctggtgctatcatgggattcttgcttttcttcatgtaatgggagggtacaggggaatattgtatgttggagtggagcgggatttatttttccaacactgatgagtataggttagggagttgggagtgcactgaattgctttttttagcagttcaattttttaaaactgaacttaaaagatggttcggttcaatttttatttaaatggttcaatttttattagtttattttggtttagttatattatagttcagtctgttttgaccacctctttggtgcacatgtatctttcataatagtaaaatatatatgtgtaaattgatttaaattttatttgtgtaaattaaaaaatattaaaaaaaaaattattagttgtgttcaagtgaaacatgtagtgtgaatcaaactcatgtttgaattgaaattgagatattgatgtaagtttttcccttctaaattagggatatttatatatgaaagagattgataataagtttttttaaaatggactatttgtccctctattagaggggtttagaaatgtttgtaattgaataaatagtttgacaaaccaatagatgatatcaaattagaaaatagaaaattttgtataagttatatcctttgtggccattttgtaaaaagtcattaggtattaatatgttagatatgtgtgacttgattggtaaaataatatctcttttaaaaaaaaattatatttttctaccattgcaaaaatagaagtttattacgaataagcaagatgttgaggaattgtccatatataaaatcataatattatattttaaaatatacatgtaatcaaatattttttacatttttacttcgatcaacaaaaaattatcatatcaatcaacacggttcttaaacatattatataaaataaaaaaaattgaatatttcaatttatattattgttatataatataactgctttaagattctattggaaatagaatgaactaaaataaaatataaatatattaattaaattatttaaaggaaatggatacaaggattcatgtattgaataaatctttcttttttatatatacaagatagtacttataagatgcaggggtaaatttgaacatttttttagtcttgatgatttttttttcaggaaataagcataaaattcactaaataatcagggattaaaaaagtgtcaaagataaaaaaaaacaaaattcttgttttattaaatactcaatctaaaaagaaattcatcaaagagtaaacataaattcatatatttattaagaataaaaaaatatatttaacagcgattcactttaacttcaaaaaactaaactaataaggtaataatacacaaatatcctattattttaaacatcctaccaatatatttcatttctctttatctcttcctatcaaattataaatcctatcttacttattttgtcatgtttctaggtgttgcataaagtattagggtgtcaattaaactttttccaaactaaaataagtctttcactgcctttaaaaaataaaaatagtgtttcatgtaagtacatgtacacataacatataaatgccggaacaccacattgtaaacttgaaatcctagaaagataggaattatttaactaaaagtagtaaaataatgcaattttaactgtcataatatcattgatgtttctcattctctaagtatgccatcagcatcgacaattggcaccaagtattctactttgatcagattcatgctgaaatcccatagtttcttagccaaatcaatgtcccttcctagtgagtttgctttggcaattttattatctgcaaaatactcaccactaattcctctcacttctgggtgcaatgctacataacatgtcgttgccgctccctgaagtgaagttgaagataaaaaagaatcacttgtaaagagcatgcttgttttttttttttttggaaaggataaattttattaaaagatatatataaaaattaaaataattattaaattattttaaaagaaaaatgcaaaacttatagaaaaaattagtatttccccaatgatgttaattaattgacaatataattaaaaatatctttacactcacattatattttttttgaaatttccttttagattaattaagtaacaaaacccctgacgtggatatttggattttgatgctcaaattggtttaacttacctgctggacatttttaattacaagattcaacaacctcttaactacacctggaattcctgcataaaccatacagaaaaatatcccatcaaactaaattacttgcataaaaagaaaaaaaaagaagctaaagacaacatgagttgatgtagcaactaagctataaattgcaaaagttgccaccaggtgaacatgtgaaattgttttgcaaggatgcttaaagagttaatcctgcgcaataagtctgaattcaatattcagaacaaccaatctatttaatttaacataagcattgattatatagaaagtgtccaaaatcttatgatttacataattcctagaaagaccatatatttacaccaaatagtgcaatgttgtagttaccagtcaatattctgttgtaacgatgaatattggtggcaatggctcctggatgaagagaattagcagtaatatttaccccttcttcctgatgatcaccatgcaacatcaaacaagtaatattccatatattagagacaactgatgtggcaaaccagagggtgttttttactcacaaacataagaaaaggaaagtcaccaaaacaaagagaggaaaaaagaatgtcttatgattgtggttgataagagttacaagactagttgctagaagggatacaaagtttaagtatttccagaaaccttaaaggtaggctctaaacccaactgagaagggagaaatttggtactggtaatgacaattcagataatgaagcgacatatcttaaacaactatataacaatataaaagggactatataacaagagtgtgtagttacagtatgcagaagacaaataccgttcaaaaacaagattgttttccaaacaataaaataaagtatcaaatcatagcaagatggatctattatcacatcagaaaggacaagatatggaatgattgtataaaaaatattggtatgacacctattaaaaagaaaatggcaaaaaatcagttaagcaagtttggatttgtgtagagaacatatagatacccttgggaagaatagatcgcatgaattatatccttatgaaaagggatagaatgaaaacaaggagtgcactggagaaaattattaaaaaagaatcctggatgaataatattaattcctaataattggtttttaatcaatagtagctatcaataattaaccaactacatgccacataatagtaaaaaaactatgaatttactctttcaccagagtaacatctaactcaggactaagtagttaggatacaaaacaataaaatgttagcataccttaagacgtcttgctagttcattcgcatgtaaaatgttagcaagctttgattgtccatacgcgcagaatttctgataactatgcacaaggaagcaaaaatagtgatcgaactatacaaaacacttatgctttgtaacactacacaggaatcatgcttgtatgcttaactttaagtgcaacatggtttgtgcgagtaaaattgtatactttatccaggtgcatcaaattttatcagcaggttttgtgtattagactttaatctgacaagtgataggcctaggtaacagcaatccttacatagtaatgtgacacctaaatgccacacatatgggcaacgaaaaaaatcaatataaaaaaggaatgattgataataatattcatcttctctatagttaagcaaatgttatagctgaattaccaatgctaataaaattaaagtctctataataattgttctttcattgacaaattcctagaagaataagccttggtagattttgcagtctctggataaatcccacttccataaaatagaaagaaactggcagcataatgtatcttaatttgtatttgggtcacttcttaattacctggattcatcgttaattttatcaaaaaggattcctccacgatagttgagccattgatgaccactagaggagatattaacaattcttccttctttcttactttcatgcgttgttctctttatagtatccaacaacagatttgttaaaagaaaatgacctgtggaattatgttatatataagcaaaacgaaaaagatcatttcctcatcttcttagcctatgattttaaatacacattagaagcgttatttgatgttttatgtaaactatttctcaattatatgtgctgaggcagatcataagtgttgaaggactacacaaagatctcatgtatgaatgatacttaatttcttccctggagagagagagagagagagagaggtttcacattagatttcctacactctggaaacttcattgttatatgtttgatttccccctaaacctaatattcttgagagctcaaaaaaattcatgctatggaacatttgatagacactacatacccatgtgatttgtggcaaattgcagttcaatattgtcctcagaaagcttgaaaggggttccaaatattcctgcattgtttcttaaattgcaacaaattaaataaaccagaaaacattagcactccattgtttccttgaatgatctgaattaagatgtatgtgtagagagcgcatttgtcaaatgtattaaacacaaatacatgtatagttctcatttttcaaaatagaaagaattctcacttgatatatatgtttcctatatatgaattttttttactacatagttattatactcttacatgagaatgtttaatggaagaccagatgaaatgaactctaatgcaaattttctaacagatatcattgaactaaggtctaactccatagcatcaactttagcgttgggaatctctttaagtattgcttccataacaacttttgcagctaccacatttctcacacccataattacatgaacaccacgcatggcaagaacacgggtagtctcagcaccaataccactggatgcccctgttgttacattgtccaacagcaaccaaaaatacacaattaaggtgaaggtacttacatataaaaaattgtagatttcatatagaatttccagtttgtttagaagtgttgaagtgttataagtttgtatgaaattaaagaaaggaaaaagagagaccatttcatgtcatttgggaaaaaagtatttttagtagatctaataaaattaactactcactttcatatttattctatcaaataaaaggtgaaatttcatattctattctatttctcttctttttatccttgtttctacgcaaacaaataaagagtaagtttcgtataatttacttctgcaacctaattaactttgtcatccaattcttaatagtaataacccataacatttcatatcgaaagaagataacacctatgggggaaaaagttttaaacataaaccaacctcatcaaacttatgtggtatcatacaactataaataggtgttaaatattaagcttcccttgaaaaaatacgagtatgttcaggtttcgagttttaatattatgtcttcgaatataaattttaaaacaaaatcctccgatatctataagagttacattatttacctctatttcaaattattttatctagattttaaaaaaaaaaaaaaagaagttgattgaaaagtaagtttaagtttataaaaagataataaattatcattttagtctctgaatatataaatttgatgataatttaatccctaaaaaacaaaaaaaattatttaattcttgaatttaaaaaacagtaagaattacctactatgtcaattttaataacaaattagtcttgaattttacaatttaattttaaattagattaaaaaaatataacttaataataattgatcaataaacatgacagtttaatgataaaatcatttcaaaaacttattaattatagcattttttaacagatttaatggttaaattaaaattttcatttttttaaatattaaattattacttatttacacattcaagaatcataatgatcctttatcttaaaaaaattaacttttaaaccaaaaagtaatttttagaacagaaaacaccactgtgaccatgtttctaccagcaccataacaatcgtacgtaaggctgcacttgcaggcatcatcaccactatgtttcagttgcaaccatggtcaagtactacaattactattatcatcaccagtttcataatcactaaattgttggtatcactatcaaagtcaccaaagctgaataaatatataataaatattacgtgaagaggataaaaaatagagaatttgtcaaaaagaagaaaaaacaataatttcagttatattttggaaaataaaaagtgacctgtaacaatagcggtgaggccagtgccatcgattccttcagtaacttgttcggcagtggaagaagatgaaaaggaagaacccccatttctcccgcacggccaccacatgccgttttgatccgtctctgaatgaaaacgacgacaaaacaaagtggaaaacgcaaatagcctcttctcttcactattgctctctctctctctctcagtatatatatatctttgaggataatcattggtcatactgataatcatgttaattaaggtataaaattttacaccttaactaaacaaaaattattattattatatggttttgaagagagttattataaaatttattagttttaatttactgctgtatatgacgtgattaaataagagtgcatgcacagtgtatgtaatgtagaagtatattatatatagccgcctattgatgacgacgacgactttttaactaatttgttagatgagttattaatattggaagagttcttgatagtatgcaatattctttgtaatttaaaaagagttaattcctctatttaattattaaaaaaactcttatggtattaaaaaaagattaattatgattttgttccttaaatgttttttttcttcaaatttctcttgtctctaaatagttttttttagcatttttggtccttttatgattcatcttagttcttgttgtcaaattaagtaataatataatgatccgtcacatagataatttagtaatttcttacattatgaaagagtttaataggataattatatttttttataaattatgtttttagtcattcatcaactagactgacatgcatcattaattgatatgaataaatgaaaattttaaaacagtttattaaaaaattacatataattgtaattatcaaattctctgataatatgataaatctgacaacgtataagattgttacattatcaatgtgattccttgataataagaattaaaattgttagtagagaaaaaatatctaaaattttagccatttaggtataatcattgagctgactttccctttgacaagtcaatgtcaggtaataagttaggattataaattaaagaaggtaattaacattatattaaaaaattaaataatatttattttatgtcttactacttttatttcttatatgatactcttccatttctttttaagtattgttttagctaaaattaagataatcaagaaagttattggtttttattttattttaagagattttgttcaaatttcctattttatccctttcaaatgatttgttttcacaaaattatccaaattaactgtcataaatttcttctcccacatttaaagtttgtactagcaagttctcttattggaacaaaatgttttatgaacagatacaaggtattagaacttctctcaatgtaacaattcacattcttttggtcaataggtaataaatacacccttgaatttttcaattatttattatctaattttatgaaaaatatataaaataattaaaggttagttgggtataattgaaaaaaaagttaatattaccctaaaatctgaaaatgacagctaaaaaggaataaacttttttaaaaaatgcgacggttaaaaagaaacgaaggaaatacttattaggcaacagaaagagtagaatatgaaaataaaataattaatgacacatattttctttctttcttttttagaaaataaaatggttatataaataaaaaaatcttattgggatcacataacaaaatttatggcaaaattattaatttggtcactctatttatttaattaatttagtttaatgtttctattattaaaaattttaatttcatctcttaattttcaaaactaatgcaatgttgctctttgtcaacattgttaaaatttctatttgaaatgccttatctgacgactgcgtattaatttttattgtgttacatgtacaagaagttaatagcgttacttgcaaatggatgaaaaggacaaaattgcaccaattttgaaaaacaaattatcaaaataaattttttagaaaagaatatttagcatcttaaattttaattttgtctcgattgatctctatattttatctcttttgtaaatagacactatacattttaatttcaatcaatccttaaattttatctttttggcacatagagacctaatttcagtttcatctcaattaattgttaaaattgactcctttcgtaaacaatatcttataatgaattggagttaaattactgacaaaaaaatctaaagtttttatttatttaatctcatctgttttttttttataaatcactttttcaaacattaaaacataataaatttagaattaaaaaaattagataaattttttttattaatgttattatttcccctttttaaatatatcttataaatctatattcttcattatatttaaatatggaaatatgagttgtaacaaaaaaaatgaatgattaacatttaagataaaaaaacttgaaataaaaaatattagtaaaaagataagttttaaagatcaattaaagttcaagttcaaggtgactatttacaaaaggttaaagtttaaatagtaatcataataaatttaaaatttatggtgtttatttataaaagaagtaaagtttaaggattaattgaaacaaaattaaagtttagggtatttatttgtaaaagaagaaaagtttaaggcaatttaatgttttttactcaattgtttaataatagaaggataggaaattgaactaataaagagagagactaaattaataatttagcctgaattcattaaatatgctaggtaggtgttgagttcatcagaaattagtaattggctttgaataacgacagttatacaatagtacaatagtaatttctaaggttgtgatgccttttagacactagaaactggtaagtatgtatttgccatttatgtttatgtccccctgattcattatgacatccttatctacgtacctaaaccattactcaatgtatttatgtatgcaataaacctgacattgacttgtcaaaagagaaagtcaaagagaataagaagaaaaaacaaagggagaagaagtgagcaacctgtaacaatagcagagtgaggccagttctatcggcagtggtagaagtgaaaagatagtagaaagagaggaaaaataactttcatacaataaaaaaatatagtatcattatatgtaccataaaacgataatatagaaaaaaatcattatcttaacataatttttattaaagatatttatattatttgcatactttcttttactttcgatacaactaaaaataagtaaaaaaataataaatttttattttatttttaaaaacagctaataattaaaagcatctcactttttactttttttctttttctttttttttcctcttactttcttccatatatcataaacgaaaatgataggaaaagaaaatataaaatgcaaaaaaaaaaaaactttccttctttaacaattgtgtactaggataatgaaaatagattagaaataggatttaattttgacttgcttggtttgagacaaaaagaacagaaattgaaaaggaaaatattatgagattgtttttggatagaaaagaagagatcgaaaaattagattaaaaataaaaatactattttcgacacctcaacgttcaataaagttaagtaaattacaaaggatgccttccaggtgaacaaggaaaattgtttcgatagaatgcttaaaagatataaggtctgtttgggtaaatttctttggaagtatttctagaaaaaaaataagaaaaaaaaagatgagataagtttttccaatcaataaaaataagttttccatgaattaatttttaaaaacccatcaatatagtttttctaaaagataaaatgatatctacaaattaattaataaaaaatttattttaactaatagagaatatcatttcattttttatctttttatttttttcttctaaaagtgcttctaaagaagcttacatccaaacagacccttaaccgaccacttcatcattctgaattcattaattatttgaaaggtccaacctattcaacatactacttgggtattttactcaatcaaattcaagctaaaatcccaaagcttcttggccaaatcaatgtcccttccctttgagattgttggggcaatattacaatctgaaaaatatttgccactgatttccctcacttgtggatgcaatgctacatagcatgttgttgcagctccctacagtaaggatggggaagaaagcaaatatggaaagatcaagtcaataacatatgaagggaaattatttcaaaaacttttaaactattttcaggaaagtgcttttttaattaaaagatgtttaaaaaaattatgcgttttttaaataaataaagcaaaaaatgcattaacattattggttttttagaagaagaaaaattacatgtatttgtcattttaaaagtccaaaacaatattaattgctattttgtcaatgatatgagttgaactataagtttaagtttgtttgtccaactaaacgaacaatcttggacaagcatgcatttaatgaataatcaaacttaaattgtttacgaataactcatgtcatttgtattgatatctctgttcaaatatcatatttgttctagttaccaaacatttaatttaatgaataatctaacttaaatagtttacgagaactcgtgttatttggcttcaaatatcatagttgtttaacttacctgttggacatttttaaacacaaatctacccagcgtattaattatacctgcataaatcaaacagaaacgatccccttaatcagaaactatcattaatctgcatggaaactactttaataataaaaaaaccaaaaaaaaactatcattttttgtgtgaaaaagagtttttcatatttttgtatatatgttactttcataaaaaatggcatagctctatttgtcttaattaaggtaatatacgcatcttaagaaaaatattaatgacataaggtacggtgacaaaatgatcattttgacaaaaatacctttattaagatctaaagagacataaaatatacgccagaaggagtacaaggtgaaaacacatccaaagccaagagttgatattgcaataaagaactttcaattgcaaattaaggttgcctcatgtgaaattgtttttgcaaagatactttaaggataattaagaacgtacatgcttgaaggattacaaagtctgaatttaatattcaaaagtcccaatctatttaacataactattgttttcttttaaaacactatatatccatgcacaaaatataagatttgaacacctaaaaggctaaaactaagcagaggatggaattgggcttatttcattgtgaaaaatcaactgaaacttttccaagagattgaattcaaggaaaatcaacaaagaatgctttattcagtatccaaaatccaatcatttacaaaattcctaaacagaccataaattcacacgaatagagaaatgtggtagagaaattaccagccagtacactagtgtgacgaaaaatattggtgacaatagctcccggatgaagagaattagccgtaatatctaccccatcttgctgatcaagatgcaaaacaaacaaataatttaactataacatattatcacaaacaactaatgaggcaaccatttttactgacaaattacaagagagaaaaaaaaagcaccaaaacaaaaggagaaaagactctcctcagactaaacaaaattgtcttctgattgtgattgttaagcattctcagaaatctgattggctagctacaaaaccaactaaaatctaggagttagaaaatttagtaactaaccgtcaaagacttttttccccgagacttgttaacagttaccttctcaaaattaaagatatatatagtttcaacttgtagatatatattagataatgaagcaacatatcctatataattggcgagaaacgctattaaagaacaagtaattaactataagtaaatccataaatatttggctagctagctagtgaatcgtgataaaataatttaattccaatgaataatatgtagtgagtgagacattaaaacaaacatagtgcaatatgaatgatagtgatctttgtaaaatacaaagactaacaaaccaatatttcgaaaagtagactgaacatcaaaccagaaagggtactggttcacagtaatcccttcactgttttaaagcaataaaatgatcaaacattactaagatattatattgaacacatatatagtaccattacataacctacattattttgaaactcataagtaatagacattagatgtgtgagcttatgaattaaaggatgtaagatcaaattgaacgaggtcaatgtggttttgcagtagtttaatccactcatatcagatcaacccagattttaaggggtttcacaaatctttgactttttctgtatgatgtcataccaaggttaattaaggatcaaaatggtccaattcacttttaagatattgtttggataaaattttcaataagcaattctaagaaaaaaataagataaattaaataattttttccataaactaaaaataacttgtgcataggttaaaaaatcattttataataactaatatgagaggtttttatcaattagcttatgtataagtaaattttagtttataaaaaaaattattttatttttatatattattttcttcttttagaagtgtttatgaagaaattaaaagtgacaatattgaaacaaacattaaaaaaaacttagaaacaggtcttaacatagtccggatacattaagccacaatggaaataacatataatataaaaggaattttttattttttatcttaaaaaactccgattcatcaagaaaaaaagattttaactaattcagattttaaatgaaagataaataaaatctaacaaaaaattatttttattaagaatcaaattcaaatattatcgtaaaaatttatttactttttaagtaattagccaaaaactttagatgaattaatgagttataataatactaacacataatggctatcaataactggtttttaagctgcattatggtttaggggggaaaacactactaataacaacctttttcttcaacagtattgtcttactcaacactcatgatatggtacaataataactgttagcataccttaagacgtctggcaagttcattggcatgtaaaatgttagcaagctttgattgtccatatgcaagccaattgtggtagctacaccaaaaggaaacaaacttcatgaattatacaaaacacttatcctttgcatagatactacatgaatcacgtttgcatgcttgattctaaatgcaacaaggatttataaaactgcaaaacctatattttagctaggttcatcacatttatcagcatgttttttttagattttaatctgacacattctattagtgatgggcaacacaaatccatacatagtcatgtgacacgtaatgccaaatctggacaagaaaaataattttcacaagttaatattaacgataatatttatcttatccatggtcaagcaaatattagagctgaattgctaatagtaagaaaaatgaagtctgtatcatagatagtcttcaatggataaattcctagaagaataaggcttcatagtttttgctatctcaataaatcccttttccataaattgaaaaaataaaatgccagcatagtttatggtagtttgtacttggggcacttcttaccttgatgggtcattaattttatcaaaagggattcctccacgaaatgttaactgatgaagtattgaagagatattaacaattcttccttgcttcttgctttcttgtgttgttttcttcatagtatctaacaacagatttgttaataggaaatgacctgttgaattatgttaaataaaaacaagaaggtcaaatttgtttcacatctttgcagcctgcctgtgcttttatattttatgttctatataaactatcaccctagtatataagctgagacaattaaaccataacgatagaagggcaaaacaagaacttcatataccaataatttataatttctttctaattatcaatgtgtatgttgctacaaactttcactatttatccctttcttaaccatctaaatgagaaggaaaaaaactacatcatacgaaactttcattgtcaataatatttctttcttttccctaagctaaatacatttggtttgacaaaagattttcattttactttgttttctgttttttaaatttaagtagaagagaaaacagaaaacaataaataaaaaaagaaattactgttttctgttcaaatttataaaaaaaaaacagaaataaagtaaaaacttaaaacattttttcaaactatacctaatacttataatttaaaaagttaaaagaatttcaagtaatggaagattagatagatctcaacgtgcacgtacccatatgatttgtggcaaattgtagttcaatggcgtctgtagacagtgtgaaaggggttccaaaaactcctgcattgtttcttagaattgcaacaaataaagcaaaacacattactactctattgtttccttgaatgatcaaaattcaaaagtaagatgtgggtatatagatagtgtgtaactgtcaatctatcacacacacacattcacattaataaatgtatggaaaattttgacgatgtaacctctaatgtgctcttacatgagaatgtttaatggaagaccagatgaaatgaactctgatgcaaattttcgaacagatgccattgaactaagatctaattccatagcatcaactttagcagcaggaatctccttaagtattgctcctttaacatcttttgcggcattcatatttctcacacccataattacatggactccacgcatggcaagtacacgagtagtctcagcaccaataccactggtagcccctattgttgtgtcatccaatagcaacaaaaatatacaaattaaggtgaactatgtaaaaaaatttaaatttcatagagagagtttatgtttgtttagaaggtgcgggcactaataatttctactaaacccaaactcctttgatccaatattataaatctactcatatatgtttcatcttgaatgacagaattatgaactattttggctttattatatttttggtttcactatttattttgttcaattttgtcttgctataaattaaaaattcaatcagattccattattagcctcaaatgtagtcattttttaaacctttctttaatatttttaaacattctagactctctcactcacaatatatattattttttccttcttgaacacataaatactcaaaagaaaaaatacacactttaagcactctggacgtgaacactgataagtgtgtgaatcattacttttcattaattttacatagcacttcatcttaattatcccttaattgatacttagcttgagccttttgttaagatttataattcttcttagttcttaacccatcgtgaataaaacttaggaataatgtagttttggtggtgtacttttacagagtttgatgcatcaacaagaaaacaagaatttttggattgaagtagttcgcttagcatatttgcacacacttatggaatctgtaggctgttggggggacatctgatggtaggtatctgtaggctgttggggggacatctgaagcttggagtacgttgaacaaattgttcccactacaaaagattttggttaagcgggcacctcaggctcaatgcatagtcatttgagcaagtttttgtatgcacatttccaaagttggattaaacatgtaagccattatgcataaatgatagtgcaatctttctcaagctatttaaaccttgttttcattaggattaagggtacatcgactttgggttttgtgagagtggaaaaccactgtgccattgactttcttcattgttcttcagtcttccacttccttttcttctaattctccacttttcatgcttctcatgctatgtgaggctggtttttctcatagttaaaaatttggtgtactaacaactctcacgtagttattttcactacttatttaatgaatgttcaatgttattttcgtttctttatttttaatattagtttgtggattgatcaatcatagacttatgttgtagttttttttgtcattgaaaaatattttgagtttaagaatggtaactaataagtgtttcttttgggaatagagtaatatttattagtctccaaatgatttttgcttatatcaaatcacttaattacagttgttaaaagattaggaatgaagttaagaaatttaatttctatcatttaagggataaggttagaagatcacagtgaattgagatgacattggagtttattggatagaaaaaacatattttattattaagatgttaatctagtattaccataatttccaactattccaatcgattattgtttacaatcttagaactctacgtgtttcattgtttgtttgtgtgaaaatctgatctgttttattacattactttatagtttatatagattttaaatttttgcactttcactttggaaatcaatctatttattttatttaactgcttagaacttaatttatataaattatttagctcgtttatattaatgatattcaattttattgtttaattattagttatacaatttgatttgcttaccaatcggttaataaacacacatattcttcatttattttgttttttttttctcactcaacattcacatttatcttttcttacaccctgtaatttttcttttatcatccttcatagtaaataaggataaagatagattaggtggtctgtcggcgcctatggcatgacctgcacaagaccaattagctaggtctactttgtttattgaaaatgtcatttaggttgtaaaaggattagggacttacgtggacaattttgaaagaagaaaaaaatacaagacaaaaaaggaaaaagaaaacgataaattgcatgattaaaaaacttaattaagccataatgataagattaaatttataaattaatatattttgacacacatatatataaggaatttttatgtatatttactaacttattggtcagtgtaaaaaattacgacatttattacaagatagagagaagaatttcaccattttgcggcaaactcaacaaaaaaaaaggtgaaagtactctaaatgacttcaagtcatcgtacgtgaatgcaacttactacatactccttccgttttacatagataacaaaataattatataaaattaattttattttatcattaatttatttatatttgattgtttacagctaatactataaataatataagagaaaaatatataattaaaattatattaaaaaatgaaaatgataattatttctagataaatattttttcttacacaataattaattataatgagaaaaaaatactaattactagtaaaaccaaacacaattagacaattcaatcatctctgaagtggtaattaatctatgacttgctcacttaataactagtaaatcaacaccaaatgtcttcatatatatttaagtgtgcaacctgaaacacgaataacaaaacgagaatcgaataattaagtcttactaaccagtaacaatagcagtgaggccagtgccatcgattccttctgtaacttcatcagcagtggaagaagatgaaaatgcagaacccccttttctccagaaaggccaccacatgctgttgttttgttccgtacgtgctgtacgctttctataacgggaaaatgaaaatattaaaacaagagttatcccaatatataatctactatcgtgtagtagtatttatgaacacacctaccatttataaaataaaataaaaaatgaacacacataccaataggcatggtcacattgaaagttatcccaaatatatataatatatgccaatgttaacaagtgctttaaagatagtgcttaaaataaaaatatttttacttgagagatgaaaaattatattattttttattttttatattttttatgatttatacaataaatataaattttaatttcttaattaatgtattaaaatattagttagaaagacccataatatacaatatatgtaatctaaagtagtatttatgaacacacctgtcttgtaatggagccatacacttaaaaagtttcagtcattaaattacacgaatggctcaagtcttgctgcatgtcctccacattatcaaaaacacgttgaaatataattcataattacaagtaatgagggcattatctcctcctagaaagatgagccatgctcctctttgccatatgtgtaagacaatcaatacatccatatatatctagacattaattacacgctttatcttcaaaactatacaacgtacagaagacaataaatagtcgcagaaaacacaaaccttccacagatccacgccttttagagaaagaaatctacaagttcaatgaacccttcacacctcaaaacctgaaattggtataaggaggaaataaattaaactcggccaaccatacgtacccctcactgtatgaaatactaaaagggctacaactagcaatgttactgtagcattctagaatagatactaagaccaaagcaatgaacataaacttcttttttaaaaaataaaaagaaaaattcattagtgttaaataaattacacttagatatattttgtgtcttaaatttaactaattatttttattactaaaaaatttattttattagttcctcaaattttttaaaaactacacatttattctctcttttattgtattaataatattataatttatgaaaatttttcttttgtcaaaatttatttttaattttattttaaaaaaatgatttctatgtagtaataacaacaataaaaatgataagagtgataccggtgacagtaacaattataagatgtgatagtagtgttgataaggataataggaatataagtatttttatttgtttattttgaaagaaagataatataggaagcgaatttggtaaacaaataaaaaaaatatttatttgaagaaatcattaaaaaattatacattgacgacgaacttttgttaaaagtatgtaattaattagttttaatcgtgtgcaatattgcacacattcgaaaagtcaaaattcccctgtatttgtaaatacagtgaagcatacgtgtcaaacgtttgttatgtcatctggagccttgttcaagttttgagggttattgcattggccgttggacctatctgtttggacattattattgctaaaatttctcaagtttgtttgtctttttgcttgaagttatgctcccctttttggtacaaagaagaataagcataggagttggtgtctacacaatttgaaaataagactaggtagtttaatgaataaaaaatattttcattccataataaacattatataataaaaaaaataagttttaaaataagtgtatttttttcattataatattaataataggttagtttcatacaattattattcttttctatttattcattgtaactgaatatttaaaactaatttaaatatatattttatcttcaaatttcaaacatgctcctaagtccaaccaaacaatttcacttaacatcttatctttttaaatctatatttttcaacacatttacttctaacttaaatttttatatttttaaaggaaattatcaattattaaaaataacaacatatcacaacataaactatttattataaatataaaatataattcatatgttaaaaaaattattatagattttaattacaatataatttatatatttaaaaatatttattcattataaattataatttttagttgtataaaataaatacatattttgtacaaatgtacaagctaaaatactaattatatatgtgagtcattctaaaatcagaaaaagactccaaaaacctgaacaagttttattacatatcatcttgacataattgttggatatcacacctatttatgttgtatgtcatctaacggccttataatcgttccctccttttgtgagggtgtatgtgcacatcgttgctctcacatgtggaagaaacgatgcttgttgcactctaatcacatgctagaaggctctataaattttcatctcttgaacaattaattcataatgttatggtttcttaagttgacatgtctcactctcagtagttattgtcaactcaacctttactttgtgtatctcaattggcctgactaatcagataattctcaccctctcaagcgctaattaattaaatctgaaaaggcatgagagtttatcatagtcatttgataattagtctgtctacctaattacaaaccctcaaatgctaaaattgaaagttttgtggactcttaattatggttgacttgcctcaccaatctgtccattataaataaaaacactaagctatagagaggcatagggcacaaaggatcgatggaaatttattattaaaaactacaaatgttcacagtagttattatttagtcactaaggaagtatatgccatcagcattcacatctgctcatgaatcatgggcattgtagtcaattattttcatgctgaaatcccaaagtttcttagccaaatcagtgtctgttgccagtgagcttgctttagccagattactatctgaaaaatactcgccactaatccccttcacttgtgggtgcaatgctacatagcatgttgttgctgctccctaaaatgagaatgaagaaggagtgcatggaagattacaaggatcccaaattaaatatattgcatctttggattactttttagattaaacaaataataagtaataacaatgcccttaaatttatattcaatagatcaaactaggtttaaattacctgcgggatacttttaagcagataatctccaagcatattcattagatctgcatgaattagacaaaaacataaccatacaactcaattttgttatcatttgcatggaaaaatattgaccaagataagtttatcgacaatatataagttgatgttgcaattaactaaattataaagtatactccaagtgaaaatgagaaattggttcaatccaatgagaaattgtctgaattcaatatttaaaagggccaacctattcaacatataaccatttgtctaatctggttagttaaaacacctagaattatgaaaaggacaattaaaagaatatggtggatgcaaaatactttattccctccatcctatgataaatatcgagtaagaagaaaaataaattataaaataagtttattttagctttttatgtaatattaattactattttcatttatattttaaataatattttctagactttatattactgttgtgttacatcgattcccacaaagaagattaataacaatgttatttttataaggttacgaaattttttcacctatataagttttttttaattgtatagaaaaatttaggaccatacttattatacggcaggagtatttagtatatatagtatcacaaattttgagatataattcccagacaaaccataaattcatatgaatgatgcaatatatggtaattaccagttggcactgggccactaagctctggtttataaatattggtgataatagctcctggatgaagagaatttgcagtaatatctatcccatcttcctgaacatgatgtaatgattaatattagatatatcatagacaactaatgtggcaaaatcaaaaggatcatcgctatttacaaacagaaggaaaggaaagtcatcagacaggaaaagagagagaaaacaatgtgaaaagtaaacgtggtgatatgaacatatagtttgagcagttcaaggacatgaaggaaggacaaatactaaaattcaggactaacaaaaaatggtcattgataatcaaacaaatatttctgaaaagctagtcaacaatcatctattccaaagaaaagcttagtttcaactaattaataggttataagtaacatttccttcgtaaatatagtaagatataaaaagcattattatagtattgtgcagaagacaaatactgataaaaaaaaataattccaaaaagttacataaataatatgttagctcatgataacatactagattcctttgagcacaattaacatagtaagatataagaacaaagttggtgcaatgcaaatttcatatacgcaagcaatccttttttactaacaaatattaattattaatttgttaatttttattaacaagcaagatcaaatctgcaacctttttcttcttcttaatcattcaatcaaccttatatcttctcatatgcaattaacctaacaataccaaaccataaaaaataacactaaacatcaaactaaaacgttcatcagttcacagtttagctagttatgccagattgatcattgaaactatctaaacaaaaaaaaatataattttgttttaaaagtaaaacaataaaatataggataaaaaaagtagtaaacatatatagtcacacagaaagaatatatagatagaatcagaaataggagctatcaaaacatttgtggaagcccaaaagtcatgaaaagaataatgtgcaggttcggaatttgtttctcactaatcagtcaaaagtttagagaaattaattgtagataacgttgccaactcttaatggcatcaatagcataaccaactacaaacatagcattatggtaaaaaaaagaagtattacccacactttctcataatagcatattaattattttaaaatacaacaaatattagcatactttaagaagtcttgcaagttcgttggcatgtaaaatgttagcaagctttgattgcccatatgcacgccacttctggtaactgtacaaaagaaataatcaaatatatatttacattatatttttcatctccagagacactataggaatcatgtctgcatatgattaattctaatttctacatacgctatattgttcacataagtctaccagacaataactatatccaagtgcatcaaattctaaatcatattagcgggtttttgcatgataccttctacaagtgacagaccacaaatgtgtgcaaagcaagttagtaatgtgacatagggacacaagaaatgaataaacaaacttgagattgaaaataatatatgtttttggttctttaataattgaacgcataaaattgagctgaattcccaattgcaataaaattgaatctccagaataatatgtcttcagggtacattaccttgattcgtcattaattttatcaaaaaggattccttcaggatatgtatattggtgaccatcagaggaaacattaataattcttccttctttcttgctttcacttgcagttttcttcatagtatccaacaaaagatttgttaaaaaaaaatgacctgtggaaaaagaataagttcacttctttttattcttccttgattggaaaaacttatcaataaaatttaaaaaaaaatgaattaaagtttttataagttaaattaaccaatgcaactaactttttttataagttttctcatagaagttgaagctcacaacccgattttaacttatgcaagaagtttgatttattttaccgctatttgttagcttctataagtgtttatcaataaatttatcaaaactatataggtattatgtttcaataataattataatccgatccctttccctttcaagagatatatatgctgcaatagaccaatactaacaagcatctttcatccttaatttagttctttgctttagaaagaaaaaaatcacattccctacactcccaataaacttctttgtagcattgtagttttgccccgcgttccccctttacactggaaagctcgtaaaagattccatgttgccatatatatataagacatttctttcgtacctaagtgatttgtagcaaatagtagttcgatgttgtctttggacagcgtgaaagggaatgcgcttattcctgcattgtttctaaacaaaccagaaaaatattgttgctcatgtatttctttgaatggtcaaaattaaggtatatacatgtgtgagaggatgtgtaataactaataagagagtgaattgtatcataagagagtctgaaacaacacaaactttattaatattatatgaaattcatgttagacttattaaatgagggtcctactctcaatttagagagtctcacgtaaattggaatcaataataaataaatgtactataaatgatcagctgttaagttttagggaatgtatgaagaatagagatcgtaactatgagtcttattgaaaggattattcattggtagaaattattagatggtattaatccaccaggcatcttttatctcacccaatctttatataatatacgattgcgatttttaattttaaaataaatcaacaacattcaattatgtgttatatgaaaattggtttggatcatagtagttctggactaataatttcttgttaaacaagcatatgtaaaaacattaaacattaatgtaacctataagtaccttacttacatcaagatgttcaatggaagaccaaatgaaatgaactccgatgcaaacttcctaacggatgccattgagctaagatctaactccatggcatcaactttggctgtgggaatctcttcaagtattacctctttgatagtttttgctgcaatcacatctctggctgccataatcacatgtacaccacgcaaaacaagaactcttgccgtctcagtgccaataccatgggttgttcctgttattatgatgtccaccaacaacaaaaatatgcaattaagattttaagagcacgtatgtgcctgatatatactacaagcatgcagcacatatcacattaaaccgtagcacattaaaacatagacacattccaagtattacttataattttgtatagatgaagtagtcaagcagaatatatgaatttggttatagaaatatagaaacttctatataaactttaacatttcagattttcattgttcttcttccaatggcctagccaagttttgtgacggttgttttgcggcattaaatggggtcgcaacgtgtacaaggccccatgttcatattaaaataaaataaagggtaacatatattagcttttttaaggaaacaaatataatttttcaaaataaatgaaagagtgatttgaattcaaatattacttttttagtttaatttctaacttatcttatattccttgttaatttttatttttcgttgaattatctaggacctatatctaagggtaattaaaaatgggtgtagagtaagatacagatttcaatctcaccaaatcggattggaatgatgattcattcgactatgatttattaactataccaacgtattcaaaaaaaaaaaaaaaactataccaacgtatactcaatttttactatccgaatctcattatttatcatatttataatttataattttttattctcttttctttctatctcttctcacttgggatgtatgcacctatatctgtaaaataatcattattcattttaacatcgttttttatttgtaaatccatttaaacatcttgaagcgaaggagagtataatcgccataaattgtatcacttttttacgtatattgggaaattataaaataaaaaaaacttttgagatactgttttttaaaagtttgttttcagaaactacatttattaacttgtaaaacatactaaacttacatataattaaggaaaaattttcttgaagaaaagcacaaactcaacatgccctttgattagcttgttagcattaatgtttttttttatatatatacaaatagaaattgaacaaaaagaagttaagaataatctttatgcctgccataacaaatgattttgaagagtgtgcagggtttataatatatgtgtatatataagtttttacaatgtaattttaaaatacaaaaaaaaaatctaaaagtaaagtattcccataattaaaaatcataaaattaactctggaaaagtaaaaattactaaaataggctttaactctagattaaccataagggtggatttcttttttgagaggatatatcgaaaggtagatatgaaatgcaaatactctaatttattttaggctgtgggctacctacaaacaagccatcttattaatttattggattatttatatataatgctatatttattttaggctgcaagagaagcatctatgtttgtgtggacaaaatgttcgacccaaaaatgaaatattatttgtcaaacaacatgcatgaatactgataaaagaaaataaaaaaaatcaacatgcatgatggagagatagagtggaaacaggagaattctttgatttttttttatttatgtttttggaaaaagaaaaactgacctgtgacaattgcagtgaggccactcccatcgattccttgagtaacttcctctgcagtggaagatgatgaaaacccagaagaacccatgactaacagctcactctatctttacctgtctctttgtgcgaccgtgttttgtgagggttggtgagaagtgtgggttctacttaaatgtgtaagttgccgtcttattgattccaagaattcaaatttggaacacacctgattggttcacgtgacgatttttttgtccttcttggattattcatcattaatattcaaagagtattaagattagtgtgtcaatcagttgcacaatgttgttttaaatatttaacgagttgtcttgagtcttgaattttagatataaaattacattaaatattcaaaaatacatctgatttataaaaaaaaaataggattaataaccaattatgatcttgtattttatactcttgtcaattttagttgttgtattatgtaaatgatcatttacaattagataaatatatcgacaatttaatcttactgttaagtgatttttatttatgttaatgttttttataatgtaacatctgaagaatgacataacgaatccaagtgataaaaatgatcttcatccataataatttgtggaccacattattaatttttgttttaggcacacaatagtactatgtgtcctctactccaaattcttttctcaatttctcctacaaccctcttcatccacacatcaccatgtgctggatgttaaagatgattttcaacagcaacacttcttttttttccttgtttcttctctctctccaccctcttctttatgacaccattgacatccttcacattctatcaaaactcttaggtcgcattatattaatttttttggaattgattacatcatattaacatgttaatgaaaaccattaacaatatgaacaattgcaatcctttgtaatttcataattgaaaacctaaaagccctattaaggattcaaaaatcctttgtggtgacttgtgatggtgggagaagaagaagcaaaggtaaaacaagaaacacaaaacaaaacacattgtttggttgttgacgtttgtccatgttgatggtgacaattcacaacaagatgatctttcgaagcactaccttaagttttgctcatagcctttgatgatggaaaagaaaaagaggggaaacaagtgggagagagaagttttcaccgacattttggtccaaacaattatgcactaatatggaacgtcccatgtacacattggtttggcagtcccatgtacacactggtttggcacataagctggaatgtatcatgtataaagtcaacattaacagaaacaaattagacttgaattaaaatgtatcatatatatatatttacataattgtggattaaattgataatttttataatatatggattaaattgttagcgagtataaactataaagataaaattgctcatttaaaaaaattattacgaatatatattctaacatttttttgtcataattttttattattgattaaattttatttaaaattataaaattatgaatgagagttattaaataaaaagtatgacctccattttttttataaattgtaatcagtaatgaaaacatgtgtattaaaaaaatgttaggaaatctgtttctatcatttgtctccatcgttttgtttaggcttagcttcggcaatttgtttggtttatacatgtccatgtgccacggccggctttataacacacggccacctgtctatgtttttttttcttaccgggtaaaatagttttttttatagttaaactagtatttcaaagtcaaaattaatatatatatatatatatatatatatatatatatatatatatatatatatatattatccaagtattagttttaaagttaaaaagaaaaaaaattacactatcattacataaactattttctttaattataaaattttaacacttttatcttacatgtatgatcgtttatataattaaataataatgtaaataaattatctattattagtatatttaaattaaattatttttttctataagttgatttggaagtagaaaattccaaaaaaaattggtgttttgcatttggagaatgtcccttagtagacgtacaatctcaaaaaaagaaacatcattgatattggctcatgttatgttgacttgcccattttcatggaacggatggaacaaatggtatcagtggatgatgggatatccaaatggcccaacacttccatcaacattgttgctggatgtcagggaaaaaagcattgtgggcttggctcaattaatgcaaattaagctcaagggtctgaattttctgggattctagctgcaactattttttgcggtggttgttacatttaataaaatttagtagcaagtttctcattagatataagattgtttgagtgattaaaataaaaagaaaaaaaattataaatttaatttcttttattaacaaaaattaatgattaatatttattaataaaataaaatattgtatatgtataagtcgattggatgaggatggtgtataggttctgactttgatgtgggatttgctttgggcacgggtttcatatggaggtggaaacatcttatgggatatgttgggaactgggattagggggtatgcattgttcttattacacaaaagctattgctgagaccatgaaatttatttgtgtgttttgtaatggtgcttggtactaatggtacaaataaatgaaatttctttttcctataatttcttgtaattattgtgtgattctgaaataattattattttaattttttaatataatattaattatttttttattttatatctctcataatattaataatagataataaaatttataaataaattaatgatgatgtaagtttaattttataaaattattatttttttatctatttattttataaaacaacctagtgtcaattagacatttcacactaagaataataagtttggcctaactcaccgtgcatatttcaaataataataataaaaaagaacccacctatatatgcccttttagatataaatataaatcaaaatctttattatatttttatatacataaatataaaatatagtaaataactcacccctaacttgccaaacaaacaaccagcatgctaacccatagccccatgtgattgggggattcacacatgacttgcatccttattttttaaaaattacatattgaatgtgtatattttacctccccttaattttatatatttaaatttcttgttcttaattctttcatgataataattattaattttatttttaaatagattgttttcctaatttaggatcctaaatctgttattgtctgggatgatctaaatgactctacagaggaagttactatataagtttttatatcataaataagaaatcagaaataaataaattacagaataatatgctatcccaattaattttttataacatgcatagtactattgctgtaattagaaagaaaaaaatgactcctatctatgttaaattagttttttatctttattaatgcactttattttttaaatattttattgctttcaatttatcttttattttaatatattttaatcaataataaaaaatgcattaaaattatattgctaaccttaataaaaattaaaatataatttatatatttgaagacatttaattgttataaatttttattataatttaatttatacattagcaaaatatatatttatcataaattttaattatataataatagaaattatccggcaaaatattagtttaatggaacatcgttattttgttactttttattcatattttaaaatttgtgctgttgcgtgttgttggttgaatttggttgtgtccaataactcacacttaagtttgtatctatctgcacaggatcaggattacctgtagtcagctacatgactgcagggtccaatactcataatctaacggctcaagtttttttgaacttatgttttattaacctaaaaatgtattaacctaaaaatgtatgaaaaataattaacggcaaagattgtttctgcatttatttatttttgataaatcacatatatgagagaatctgttgaagtcgaataaaactattataaacgataaaattttcatatttaatctattttgagatctttaattaatctaaaataatttctcatctattaattgatttatttgctgggtggtttatgtattttttttttctccaactgaagcaatctatctccatctaaacaagtttccctttcctttcccttatccactcgtaataataggctaggctagctgcacgtgcgatgtctcgttcagtttggtagagtcacgtgcctatacccaacggcacacgaaccggagaaacaaaaacacacgccgagaaaacggaaagccctaaccagtaatagtaacagtaacaatctccgttttcttcttccatcttcctctttctcttcgtgcatgcctttctccattttcttcttcttcttcttcttcttcttcaaggtacctctctctctctatgtgtgtgtgtgttcatttcagtgttctgtttcaacgttgaatttgaactctgctggctgcgaccataattacggagttgagttatcggatgatagttgtttatagctgtgcttcgagctttatttgacgagaatttgccatgatttgagttttatttatttatttttggtttcgtgttggtgttgcctatggtagctactagctagagtttactttcttcgcaccagggttagcacgaaactgtggtttgaattttccagttagctcgttagcttagttaggtttagtggcagagtattcttggcaatgaagttgctgaaaatgaatggtttgaacttcgatttgtgggaattagagtgctgaatgtggcatcgctaggtgactccttgcgtgtttggtcatttgattggcacggtggttttggaatgtatttcactgtattttttgtgaaatttagtgtgcgtttgattttcttttttgtttttgtgtgttcattttccattggtatattttcatttaacacttaacagttttggtaaccacttgagggatttgtaggtataaatcttttattagaatttggaaatcaaggttgggatgcgcagatagacttttcaattgtaaatcttttatagaaatcttttcaattaacactaaatgtcaagactttttaataaaaactatatacttttgattccttaaccattgatctaaaaccagttaatggttgcagactgttttgataatagttacagaaatggaaaattgtttgcattttattatatggttttatgattttgtgaaggaaatgtttagaacaagattgcattgttttcagcatttggttcagaaaatcttgaaaatagtatacaaagtaaaaatgatgtgtcatttttgtaattattatggcaaaaatagactaatcacactgtaattatcaatattttccttgggttttctagcagtagtattcattgatatataatagtgtgttggtgaggtcataagatataccagtagttttttcttttaaatttttttggtgttattgtttgcaataatggtagaattttaaataccattgtgatctttatggaaacggaattgaggaatctgatgcatggtatactcattaatagacattcaacatgctgattagatagagtaaactgtttcaatttaaggtctgattaaaatcatgattagcttaatttcatagactagactgtgttttcttgattaatatgccacatggatcccagggcaagggtttttgcttcaccatttgtaatggagaaacttagaaagggtttgtgttgctattgtggaaagcagagagcgaaatttatagttatgagtaagttcaaaataaaaatattttccttttgctttaatcaccttgaaaaataaagaaattcaggtttcttcttcatattgagtaaaactatataacattttgagatcaaacttcattcctttactatattgactttagaatccgtttgccaaaggatatgattggtaacactctggaattgcagttattgaatattgaataatattgcattctcaattgttgatttatgaatatagtcaataaatatttctcaatcgtatgttgttcacctctttgtttcttgattctcatgttttcatgcatgcaggaggtgcaatatatcattatttttgctgagcaaaaaaaaaaaaatgcatgcacaaaatttatcagtgataaagaactgataaaagatttgcaaatgcttaacgctgggaccttctttggttatgtttaggcagaacatcacatggtttattgcaattgcacctcctgctttatctttcagtaccggacttgtggaaacactactcataagaatgttgttagacctgttattagaatccaggcctaacccacctcatgaagaatatttgaagcgtctacccttttcttgcaaaccaaggtttttgaagaagtgcaaagtttcctttgtgttgtaatttccttgttactgaactgggaaaaatagtaaacttgttacactcgtgccaaggtcctagttacaacctgtgtctgttttcaaatgtctgatgctgctatggcagttgtgaaacctgaggtatggtattattatattccatgtattttttttccaatccatttagggttatttgttgccatggcctggtgcatcttgctttggccttgtgtgttggttcaatgcatagtacactattgtatttgaaattgcattctcatctcacaacagcaggtcttaatgagtaggtattaggccctctaatttttattttttcttctaattagcactatgtgtatgaaccatgatgcatgctgaagtacttactctttctttttatttgtagttaattttttagattgtcttaagtcttaattaagtaaagagattcctcagctataaagcttggtctcctaaaattcttctagtacctctctttagatgatcagagtttcatttaactgtaattttataatgatatcacccattattatttttctttcacttctcctgctccatgctgctcgctatgtaattaaagattttttgttctattcaaaattattttcctacctctaattttatggagactgttttttgtaggagtccataagggattatatttgtttagtccgtcttttttatgttttaggcccatatgtagaacttatgggccattaattttctcagacaaaccataaaggcccattgcccatagagtgagcaaatgaattgaggacacaagaaggaaaactacttgatgatgagactgtgcaatattgggaagaaattgcttgtattagttctttgaatttgtagataagatcaccttaagaatgttggattttattagtattagatattctgttacctctctttaatacaaatgaatgttagttaggtctagaaccagaaattttattcagatggtgcaactaaataatatgatatatcacataaagaaactcatttccttttcttctaaaagtaaagatattttactatagtttaaatgaagagacatttttcttctcctgatatagctgttatagtactagtttcctcctcttttacctcatattatgaaaactctctccaccccacaaaaaaaaagttaaaataaaagaaaaatctagcagaatctaacaataaatagtgtgtttcgcatactttcctttatttgcccccaactacatcaccatcactgaactctacttctagattataatgaagagattatcgtgttgttctgaaatttacaacatggtaaagtcaagtttattgttgttccctgggtagctagtttgttgatttcactctacctttggcatgcttagatgaaatcctacatctggcttcaaactgtggatggttctattcagcaagtagaggaagaggtagccatgttttgccccatgatatgccaggaagtacttcaaacaggcatgggatcttccaaaaactatgctatatctcttccacaacgtgtcaatcctgcaatcttgggattgatacttgactactgtcggtttcaccaagtaccaggacattctaacaaggtcaggaataatcctaccttcatgtgattctttttacctttttttttaccttgattttaggaatatatatttttcaggactgctccattatttgaagacttggtacttgttaattttaaagtatatttgataattttgaaatactactttataaaatctgggacatctttaatttttcttttatcggctgaaatactggagagatagcaaaattaatagattaatgaatatttgattgtgctactattgtaggagcgcaaaacttttgatgagaagtttattcggatggatacaaagaagttatgtgagttgacatctgctgccgacagcctccaactgaagcctttggttgacctgaccagccgagcacttgctcggattatagaaggaaaaactcctgaggagattcgtgaaacatttcatttgcctgatgatctcactgaggtgtgtgatgatagctaaagtgacccttaaaatctgcaatcacgtttctttatttacatttggatctttgacaggaggagaagctggagcctctgagaaacataactgatgatccacgaattcgacttctaaacagattatatgctagaaagaggaaagaactaaaagagaggaagaaactgaaggtactttatactattttaattccatatttccattagtattgttggaccttgcatattgaatgttaatattattattatttatgacaaacttctggtcagactgtgttgtgattactctaaaatgtttcacgtgattcaggatgttgaggttgaggaggaaccaaaagatgagcgttcagttgaagatcttctatcatttattaatggtgcagatggaggtatgtcatgtctttctgcctgacatctcttctaaatttcatctatcattgctttggtttccgtgtttctattttatcagatctttcattttattttgggagggagcaggtgcagataaacaatggaattcttgtcttttttgttaaagaaaagtagatcacttgtattgcattttgttcatctctgcaatactgcatgtgatttgtttcctcagctttgacttatattggtgcatgctatatttatacatcataaattatttaaatctgatggtaactaattatagttttgaaagttgccatgaatattgggtttttacttctctacttctattattattattattgttattattattattattattctagaatatctaaaattcatctgatcatatcatttattctagcatatgatatgatgagataatttttagattttctaacagactgcatatttgagacaaagattggttgagccagaccaggtatggaacaaaaaccagggctagaccatgtctgggacaggagatggggctagactggaaggattgtgtatgggacaaagaccagctacttgtctgttacttctgttattattattattttttttttgttttgttattattgtttagatgcttggagttactctcttgtttgtgatagattctagagcgattatgttgatttcttgtcatcgattatctcataaaattttctacatttattcaatcatattgcttgtagtaaagtttgctttagagtataataatttgaatgcaccctatcttgtttttgctttacatagcttaccttgtctaaaaatatgatttggcagatatgaagggaactagaacaaataaaaataaaaagaagaataggagaaggaaagaccatgcaaaggatctttcttcaaaaaatgaaaatgaaaatgataaggttagactctgacgcctattacaacacttgtcgaggatatgtttatgacttgtatcctcattctcattgcttagattaccactacctgttggtgtcaacattatttttcattttgaacaagagtattgtctctcttattgaatatccttttatatattttaggacttgaatcctctcccttctgcatatcacaatgtctattttgacaatgccttggaggcctctgcaagtaaacactcaaggatgcaaaaccttcctgctattagtttttctccaaaatttgaatttattgatggagatgttgacgatgatttagatcctgcaatgaaagaggagcttgacaggttagatacatgcttctgctagttcttcaattgattaggaataagttcaaaactatatatgtcaatatactttatatgtctgttgtcaaactaatctttaattaattaactaatttgtttctatgatttccttatctttatgttaccagcatcagttggttatagaatatctttttcctcctcacaagtaaattccgtggaccccagaatcttcctgactggtttagtgcatttttcattgattgcattccattaaaattattattaatcaagaggattcttgcttaattgaattcagtgttgagcgtggtgcatttgtcttatgtagtagttcattcatttatttaattttagttgacaacttgtggaatggtcatatcaaaatataacctatgaaagaggataatcttgtcagctaattattgagtgctttattttattgttttctcttttatcttgcatttgatgactttgtttcttttcttgtagggaagtggaagattttgcacgaaggttaaattctgattggcctgaaaggatgcaaattttatctttgggccaagacagaagactagtaccaatttctataaatagcaatggttcaacgcacctgtatacaggtatgttctttctatcttctcaatattcttttagaaccctacttgctgccttgttttctatgagaagcatctgaaaattttgctcagagtctgttagttctaagatatgattatggactgagggctagactagcagtgacggtattattgcacatgttaattattttcaaggacacgttatttcatagtgcttgatcattgggtctgcttttggtccctgccctccctctcgtttttattgttttttatatgtatatcacatactggcaagttctgaatttcaaaatgattttaattggttacagataatttagaagggctgggttgagggaggagttgcaacttaggttttaatcatgaatgatgtctctatcgttgagcatataatgtatgctacatataggttttgataaaaggtagtgcagcactggcaggtaattcaatttccaaggtgagtggaagttaaagtgatctgaaaggatggcagcttagggtttgctgttgcctgaatcttggaaatgtgaacaccatgtgagtaatatttgtttgttccttataactgataaccaaagtgtagctttgtttttgaaatttgaacattttgaattctgcaaggggagagggacaaataaaagagagacaaagaagtgtgagaagaaaagagtaaaaaaacgagaatcttggaaagcaatttgagtgtaatcggctcatctaccttgaccttgtttgtttccttgtatttattccagtctccataatttttgtcaggtctttgaattttttaaaattaatttaattaatatttgtggtggttaagctatagatgagttgtattttacctttcagttggcattgttaacttgttataatttttaatggagaagtaagcagtttttttaaggtgaatctggtcgacggattgtaaaattggcatccaataattttgttaaaatgatctcataggacccctagacgagtttcatggcgtagtttcaccatagactttttctatatttagaccctattatttgatagaatcttgcagcaggtgttttatatataagacggggaacacatttatttgcgcactcattagaaattcaatactaatgtaacaggtacgagatgacgagaatcatttgggaattacgatctttgtctcatatttttattttgcgattgtatgatttttccacgttaaaatacattaacaataaaaaaaaattgtcagcagcttttagcaaaatctcaatataggtaattataaatttaggtaagttgttttaaattagtataaaattaattttgaatcattgaatgtaattaagatgcgtgtttgaattaattttatcatagacttacattagaacttgtatgtttattatgtctgaatttttaacgttaaaataaatgggcattgaagttggacagattttgcactatgtcaactctactagtatgaagttttttaacattaaaacaattaggccattgccatgaagattttttataagtaaattatttttattgacatgttttcatttgatgataatacggaatatgaattttgaagtttgaagtttttgtttggttattttcaattattttccacaaccttgttgccttagttgatgtgagaccttagtaagctaaaaatttaatggtagttgcattttccggagttcaatacactgggttgaggtcatgacacggcgttcatcggctgttgctgaaaacgttcagatttagtgaataaatagggtaaatgttcattttgcatttttaaagtgtgaaatagtaacaaatttatcctgaaatttttaaatttaaatttagtctttaaatatacaaaaagtgtgacaaattgatcctgtaattaaatttgtaaaattattttatcattaaattgtaatatttaaaattatattgacaataagttatattttttaagggttaatttaataataagatataaaatttatagactaatttattagattttttacagtattaaaaattaaatttgatttttttaatcttttaaagatcaatttattacattctccagcggtcaaaatagatatttaccctaataaataatatacattcactatgtaaaatttatatatgtctacagtcatccaatcaaatacatttcactgtaaaaaattagagctaaaaacaggtcaattgtggttcaaaaccttatacgttaaaatcaaatgcatgactattctatctaagcatacaaaacttccttcatcggtttttctcattgtactcagaggagtaatacacctttaaaacttttggaagatacactggcaataggaatccaaataggttgaaacaccagtaagccatattagccattgcaagtgctttcccaacatgaatcctccaagcagacccactgtgctcgtcattcatcttgtagacctcactcctaagccaatccacaatcgtgaaaatcctcctggcgttgtagaatgcccccagaaaagctctaataggagccgagaacctttgagatgatgccactccttccatgaaaacttggctggccaagagaaaaacatggggtgctgctgctttgatcccttcctggtcaccctcaaaaacaccctctagaatgtaggctattggagtgaaaaggccaatggtggcacctatgagggcataaagttggaggagcttgttttgggggttgaaaacttgggggtcccttgatggctgaagagaagggaaagccaccttggctatgaagtacatgtaaattagggagaagaacacaaaggcaaagtcttcagggctgaccaagccactggctgagaggacaattaccacagccagggcattgagctggttgaaggagagaaaacccactttatcttgtggtgtggtgggcttgttgagattcttgagtgattgttggtcatgttgctctttgaaacctagttcttgttcttttgggaggctaatgtcacaccctgttggcccaataccacctgacatgtttgtgaagctattgagaattagttaatgtctctggataggcgtgtagattgaatgaaggactaatgcatgggggtggatttgtttccctttgggtgtgtttagaatgagatgaacaaaatcataagaaagagaaaatgaaaaaattcagttttttttattgtagagaaattgttggaattgagatttccttttgtggtggcaaatgcatataaagaaagaaagtaaaaggaagattgggaaattttaatgatgggtaggtttcccgttagagcggaaagatgggactttgggaatgaaaatgaaaatgtgagataggtacgagaatgaagggcggaaggaggaagaaaagtttaatgaatggtgaaggtagttgacaaatggcaagttcacatgagtttagggtaaatgttgaccgatattgttgcgacatctgtcctggttaattctaagttttattacgagaaaatatgaacattatatattgtatatgttatattaatgaacatttatgagttacattatattaaaaaaacaatttatagattaccttaaaataacaaatatagatttaaatttttttacatgaagtcctgaaatcatatatccaattgtgtttaaaacccaacttgtttttaatatatagactttattttcttaaaccaagtaaaaaaaaggtgtaatcaaatttaacaatcacaatctaaataaataaatacttgaaaaactataaaaccttcaatttttcagttaacatacaatatgaacctaaaaataatagtaatttttaattattattttatcctaaaggtgtgcatctatacaacttagttctgaaaattgaattcctaataaattaatcacacacataaaatgttaatagttatataaaatgtacaatgatggaaaaacgtcattgtttcatgcattattacatcttttcatgattgtaattgtcgaagatgatcgaatattttgggattcttggagttaaaaaatattcattttgtgtacatttgacatggtccctatgtgaaggaagagacttcttattaaatgcatgtctttaatgtgattcctattgagtaatttgcattattcttgtgtggtccatgattttgttgtgttgaagtagagtatcattaagtggtagtagtaagggtttttcaacatttttcagggctcaaaatagagtattaaaacataggtttgatggtgaattcaaataggaaggaacttactaaaaaaatggacaactccaaaatttcttactctttgtattcaatcacttgtaacctcgtccctcaatctcactatttcattacgttgatttcatatcgaaatcatatataaaccctcttatgaaaaacaccattcgtttcttcatgatgttaagattagagagatttgagaatttacttaaattagatacgttcattagagggagtgggtggatttcagatcaaaacaatatacacacaaactttttggatgcggaaaaagataaatctacaaagaaattctttatgaaaattatataaattgatttgtcaaaattctagcaaaaataagtattaggcattctctcatctaatgtggtcaacaagaatataaacaatcaaatgactactacttcatgcgttttcgtcaaaatagtgttgttcctatatggttacacttcaatcattgacaaaatggttaacctctatactttttagagaccaatttatataaacccattctttcaaagaccaaaatgaacctatctattactatatagtgtttactgtatggttacacttcaaccattaacaaaatggttaacttctatgctttttagagaccaatttgtataaacacactttcaaacaccataataaccctagctacctcaacacttttaagaaccagattatatgtataactccttaaatttaacatcgtacaaaactaacacttttatgtatcacagctaaaaattgcgaccattgaattttgccacttatataataatgcttatatcaatcccaacaaaaagcctacataaaatagtaaaaataaacgacacaaatgctaggtggcttactggttgagatatccatcctaatcctggttttcaaaatattccatcacattaaaagacatcatatttttaaagttcaattctttacactttttacaacagttcaaatctggtgttcagtattcatgcaattatcatttttcatctgcgcacaacactacttcaagatcaaaataaacattccatggaggaacggaataaatgcacttagatctaagaaccaaacattctttacacgctgcgttgagcaggagtgcaagaaaatggtaaggctaaaaaaatagggatttttgaattatcccaaataatagaattactacaagcaaaatttagacaattatgccaaaaaagaatggaagaaaaaatcttgcctaatgatgacaaatgcatcataaaaagtcaacctgtacggaaatcaaacaagtttattacaaaaaaaaaaggtaataattcaacaagtaaaaagaatctaactagccaaaatcccatatgaaatctttcggacaacaggggcggaatgtaaagattttccggcaaaaacctactttcaacattctgacagaagaccatccggtaaaacttggacctctgctaacataaattggcaacaaagtcaaactctgtatatctgtataactaacaactccaatttattctttcacactaggtatttgtcttctgttttggaatatactttatcttggttcccttttcagacttcttcaacctgggtttggatttcgcaactttggaggttgcaggcaatcttttatctgcatttgccacaatgtcacatccatccatatcagaagattgacatgctgctgttttcaaatcctgtatctcctcgcacccaggaggttccgagtcggggcaaataaccaatgtcacatgttctgatgagatagcttccttccaccctgcatgaaaatagttttgattaggcaaatattaattgaagacccagccaagcatttgatcagactatcagcaaaggcatgaagtgacaaagcttactttgtgcaaggaaagcttttgcagcctggatgtcgaaccagaagcttcctggatctgctttatcctctgtatgggagaaatacttagcaaaaccaatatcaccaccggcagcagtacacacccttaaagaacttggacctgacaagttttgaccattttcatgaactgcatcaacttttgtcccgccactttgaactggaagtggatctttagtttcaagccggctaactggcctccaaaacttgactgttgagcgattgttgtcacccatggcaagatcagttttcattggcttatcccgagaaatattctgctttcccatattctcaacaatgaagtccttttgagaagccaccatattaccctctgattggctgcaattgctaagattaacagatatagatcctattaagacttcttgattcttaacttggtctggttccttctcttttatggtttttaaaaccaccttgtcaatttctgttttagacttccgagtccatactttgctaccattaactatagaagatgccttttgatcacagtgggttccatatttctgattgatttcaagttttgacactggagaattctgctttgtatgcaaaccattggctacagcccattgtaattttggcagcccctgttgtctggcaactgcttggcgcttatgtttatgtccatgtgctgactgtctcacaatatcctgatcagtgatagtttcagactctgaatgaatatccccatttatttcttcactggtgtcaggacattggaaaggtacaggtgaagctgcgttatctgaaaatgtacttggattatgagcttcaaaattgtatgtatctaaagatgcttctgccggtgataaagcctttacagtactgtcaatatcgcctttaatttctgcctcagcttggtgtctttgttccctagctttctgctctttttgtctaagcttcttctggcgtttcctctccaaaatctcagcttgtctataaaattagaaaggattattaaataatgggtcctattatgcatacttgaccagttttcaagagtatattttcagctgcatctcttgtaatttttactaaacagaagtataaagattaactttaaaatgtggtacaggatttatttataatagttcattagaagttacagaaatcatataaaattcaaataaaatataagaaaaataaattgaaaatcatagcagaagcatcctatgttcatacattaatttaagcacattctagaagtactcataaagccaaagcagcaggaacagctaaataatagcattgtgcacgagtttacacagatgaactaaccaaatttactgaaactatgcatgagagtttagtgcaggttgattatgtccttagctttcctaaaacacttattcctactgatttatcaaggatttatatctatcaagagcctatcaacccaaatagcactaggttcttctttggtttcttagttgtacaggtttattgtgggaatggatctattatttcacaaaacaacaacaaaaatgttttgttcagactccattttaaattctaaattctaaatttcattcaagaaggatgattaaaaaaaaaactagacttctattgtattgctctcaaccaggtaccttttctgagcagcttcttcctcctccaccaattgcttttggcaccttagtgcttcagcatccttgtcagcaagccatgccttcacctaaaagagaaaaaaaaaaactcatatttcatcatgactatgacagaaagaactaattggggaaagtgagattattggtttgttataaaatacagatagggcttgacataatgtattttatgtgcaaggtataccatgaccttctgttccactgccacctccaaaaattcaaatattatgacatgacatgagttggatctatgagtcaattattaaaatagaagacatttgaattgcattggttttcagcaatccttgatgctgaaaaacacaccatttgaaaccaattttgaagttaatggtttggtttggttggagagaagatgaaagaatggaagagaattgagaagaaatatttaaattaaagtagagagaaagaggtgtgggacccacactaaattttgaaaatttcccttcatttctctcctacttctccacaaccaaacataccataagaaagacaattaccaatttctgttctagcaagaaacttgtgcaagcaactaggttttttggttcaagaccaatttttccagcctctccatcaaatacatatctttgcattgattctgctgtcccacataaacaagtattttcactagcatcatcaaggatactgaacaactcctgggaagatataggaaagcaggaaggtttagattgaacaatatcctgcaaacaatttagacatattgcattaatataccaaagatacatatttaaaacaatttaacaagaaaaactaattaaaaagccagaccataaagctgcttaccaaaagggcagcaccagccatcagataatactgaggaaaagaataaaatccttggttttgaataaaagttgtcagagattttaaaattgaagaagctggaacttcctagaaagcattgtcaatgagggaaaacaaaatatttagattaatttatgaaaaataggatatacgataaacaataaaagattaaataaagagaaaccaaaagggatgagctacatctctgcatctgcattatacagttttatttcttataagtcttgcctaggacacatattttccctttcagccaacataagcaggggtgttttgttcttaacttactcccctactctttaaaagttcactatagaggaaacaaggagaaaaaatttatggaagtttacaagctatgtgattacctaactaaatacacatcttttaagggggtttgtcagtaccccttttcatacaaaattgagctgtttatagccctctttggtattctgctcatggctgtttcaaaggttttgctattttggtgcagatagattctaggtgactatagtatatttatggcagaatttcaaaacttcagagagccataaaccatgaaaagtcacccggctcatgtctcaaattaaaatgagcaaatgaagaagtgcattggagatgtgaggtttaatttcactgattcattctactctcttccaattcacagcctaatgtttcatatttggcatatcaacaatattcaaccaaggtaaaataactttatgttcaaataaataaatcatataaagagcaacaagattttacctccagcagcacattttcgaatgatacaacttcctttgcctcttctacggagagctattcaaaacatgaataaaatcaacaaatcaaagcaagttgtcttcttcatatatgttagattcacaatgacgaaatattaccttatcccaatatgctcctaaaagatccttagtttttgtaaaatcctgcaatatgtaaacaacatatgaaaacttgaggatgacaaggaaaagaaacaaagaagctgctatctaggtacatcatttagaaaatacaaaagggtaaatgtgtaaagtaagagaaataatatgatagatataattgattgagatctaaagaataccttatcaagctttttcaaccgatgatgtacacgtatatgtcttctatagttaacgggggagcaaaactctcgagaacatttgtcacacttctgcaactgaaccttcagaggagagaacaaaggccacccaggaaattctgtaaaaagaatgagaagtgatatcagaataaggccccgtttggataaattctctaatgcactcgtaggagaagaaaatatggaggtaaaatgcattgagcttctctataagctaaaatcaacttaagcaccttagtttttggagaagttaaatggagtttctataaaagtagatagcataagttgattttagcttttgcgagaagcttaactataagtgtctatggagaagtttatctaaacaagacctaagtggctttacaactaaatgcacctgtagcaccaaagttacatatgatattttagacatataactctcttaagcttgactagaacaacacaaaggcaacagtggtctaaactaaactctaaagattttaaacctcttctttatttctttttaattttactgtttcaggcatgctatacatatcacgtgataaatacatgctttaattaaattaatcattatcagctaaatgcttttgaaaatgaacctccaaaaatatgatattcagacctgaaaaagtattgctgacaccttgcggatctaaagcatggagtaattgaatccactgtacagggctttcactggcccttggaaaaggaatgaaaggttctttgccaattgcctgtctgattaaggtatctattctgtcttcggttttcatcacatctggagtgccagaggctttgagttttgcaattggcatctgttcacacaaaagcttaccaagcaattttactagactacctgcacaaagtataaagaaatacatgtaagttgaactaaatgtactacagtgttattaaatggcggccatggcggcgccatggcggattttcatggcggtttttcgaaaaaacgccaccgaatagcggtggcgtggcgggtttgggatggcagcgccatggcggccgccataaccatggcggtcgtggcggttatggccccacacgcgcacccagccgcgtccctcccgcaccccacacgtgcacccagccgcgacacccgcagccgcacgcgcacgcagccgcgacgacctccggcagcgacgcaccagcacaaacggcggcgacaagctccggcagcgacgcacctgtcacaaacggcggcctgcagcaagaagttctcgcggagaagacgaagctgtcgcaaagggttttagttttatttttgctgtttgacaccccctgttttctgtctgcagctttttttttccttttgctatttgacacccctttttacttttaacagtcccattttttttttcgtatttgacaccacaatttttttttttctgttcagtcctcttttaaatggctgagtttatttgaactctttaatgagtttatttggtgttggtacttgattattgtatgaactcatgaaacttttttagtttatttgaatgcaatcctttgtttttttcaatttcaatgagtttatatatatgtttttttttttttttggtccgccatgacatccgccattttccgctacgccatccgccatatttttatggcggattttttactttccgccatgaaccgccatccgccattaacaacattgatgtactatcacaaggaaaggtgaaactttgcttattcaatttataatgaacatgtatatgttgtcaagacaagcttaaagaggggaaaaaatacatatcacttttcccagatgtttaccaaagaaaagacacagtcctggaaattgatagatcaatgccagagtaaaaacattattgcactacctaaacgtatccttggttgaaatgttaaaaactagtgtccagatcagactaaatagcatgttccaagataccatgcataatatcagatcagacgatcatgttggaaggacaagtgacattggtaacttccacccatgcccattaaagccatgcagcaaatttctaataggttttgtgtgctgtgctgtgcagtgcagtgcagcagacaagtgccatattagatgtatttatcttacataattaactttccaaaaatagattgaacaacacaagggtgtaagagaaaatctcatttgtaaataggaaaaattctcctgaattgtttgtagacaatatctatgtatgaaataagaaaatctgaagatcttctaatgcccttgttaggcttcctaactttggtgttgtccttgttctgatgagcatttcattatcaaactaggtgtcatatgtatcatccccctttaccaccaccacctccccacattgacccaccacctgagctcatgccactgttatcacagccatcgttatcaattattatccatcgcagacggcagaacatggtggaaggccaaaatttcaccattgcgccttacagcaggcctcccttcacaaattgcttatggcagtcggcaaaaaattcgccacgtcattccaccatggtgacaccatggccgctatttaacaacactgagcatcattgctgctgttgctgcttctataaactctgtagcagagcaattcatcgtcatggttgtagcagcaggaatcatggtggcagtcatgcaattttcaccatttaaagttgatcccccccccccccccccctttcgtttgaccaggttagaaacccttttcccctcccactatgaccatttgcacaaccctaagtctgaaatcctgatcaagtgggtgtgtttaatctcacatcaactagagataaggcccaattagtgcttataaagtttgagcaatacccttcttacaagccaaattctgaggttaagccctaagcccaaattttaagttatataaatgaaatcgcagtatttaatattgcatatcacagcactatagcaccatcacagagcgccatggcatgttgctgtttctatgatctctgtagcagagtgatatgtcgttgtggctgtagcagcaagaatcatggcaacattcgtgcaatttcacagccatcttggccgctactttcacagaaggcacaaagccctttgtacccctgcaaatgtaccatttaaagctgatccccaccactcatttaaccaggccagaaacccttttgttaaagttaggtgatacagcacacagaaaaaaaaaaactaaattacagcatacatttaacctgaagaagcacaaggtgaatatagggccacaatcaccacatctgcccaattgttaaagttgggtgatactgcaatgccgattttagaatatcttgagcttattctcatgttgcgataaccaaaacaggctaaaatacaacaaaagagaaactgaacaaaaactttagcaattattagttcttgaatttggactgaatggagaaagaaaagggattaagtaaagtggatctcatttttccttctctatacataaattccatgtacccccataacagcaacaatcatgattttaaaaaatggtccaggactgtgatttcagccacaggcccacaacatcaacatttttgggcttaccacaactgcaattgtggctgcataaccggcatttaactgcaattttccaaagcataatgacaaaactgcaaccgcaattttaaatcttggcaacaatttagacatttatattagtgcaccagttatctaacaccggattcaatttagtttcacatcagcaattgtagatgcaatgaatgaaaccaaaaactacatcccgcagccagaaccaacaacacaacaagaaggtcacttcacttacaaacaagccaatcatttacaaagttcaaaacacacactggtcaagtactactcacttctacatcattccatttactcattttcaaaaaaattatccaacattattaaatttaatttaattgttcaaaactaaacaaaaaatgccaccataccacacaaaaattaaacagtgaatccaattccaaccaatcaatatcaacacatcaccacaatctctgctggtttttgttgttcctttttcttttactcatcagaaaaaaaaataaaaaggaaatgcaaaatggacaaaactcggattcttctccctctccattgatcgatacgaccaatgcccataacctagagaaccagacgacgattacccgaaccaaacgcatgcatccacgatctttcacaaaccagcattataagaaaacattcaaaacagaagaacaaataaaaaaaacaaattagttcacaattccaagcttcaaatgcattccacactaccaaaatactgaaaattcaaaattaaattgaaaaaaaatgaaatagcagataaaacgatttgaatggaagtaaaaatttgtgagggaattagagaatgctgagtagagtgaaaatggatcacgtaccgaataggaatgagaaacgagagagagctccgagaataacgaggatcggcgaagcggcggcgaaggggaacacggagtgtttggcgggaaggaaaatcggcgagaaaaggcgagaaagcgatcagcaaagaaggtttagagagagagggaaagagacagagtatatgaaattcatgaaacatgaaattgttggaatgaaggcgtttgggagagtgagttgtaaatttatatgccaagctggcttggccaatctaggagaaaatctcaaaattttaattataacttaattcaacaaattaaaccctaacctcaacaaaacaaattaaaccctatttttcattgtaatgactaataacgagtttttttattgtttgatttataaaaaaaatcacttaattaatcttgttagttaagcatgtggattttatttaacctactagggttagtacaatggtagaaagtttaaatagttttatgatgttttaagttcaaatctccttgttaggacggtaatttgtaaaaaagaaaaaaaaaagaaatagaaattttgttttatcataaatgctcgatcatatgaaacaaattttacataaaatgaaaagaaactacttgttcaagtttttatccaacattttatatattttccctgacttggtctctttggctacacatatataacatactattcaacaatttgggtgtggataaaggttttgttctagaaagtgttgggaattggcgatattgataattaaaatggtagatcgtattgtagatcaggtacagggctttaaggagtagtttgtctttctgttgttacccacaaggaaaatagataaggtgattgattgttgtatggtgtagtggagtttacagagagctcgtaatgaaaggatatgggatgataagctgtggcggatccaagacctaagtcagtgggggtgtaaattataaaaaataaattcaatagatttaattatataaatataaataaaataaaatataaaaatataagattttatttataaatttgataaattttaaaaaatgagagggtgcaagtgcacaccctcaaaagtaatgtaggtccgccactaatgataaggctgttatatattgaggaacatgcatgtgcttagcagagctaaagaaattcttgcccagtggaaggttgcacaagaagtgaatcatgaaccatatatcagccaatagagtcttaacttgtactaacttgatgtggatgccacctctacatgggttcaagaaatgcaacatagatgtatcattttaattatgaggataagagttgcatggaaatagggatttgtattagggatgagactagatccttgatacatgcatgcattagcataaaaaattctcagccttaagttcaagaaggttatctttgaggtggattgccaaatagtagctaataacattcgtaataagaaaggctaattattttgagtatgagagtattatactgcaatgtaataatattatcatatcttgtccagactttatagtctactttgtaagaaggcaagtcaatctaatagctcatggtttaaccacggtagttagagactatgctagccctcatattctagttgccctccaagttgtattgccgaggagttgagattggaaatactataagcctttttacacacacacccaaaaaaaaaagattttgttctagaaaatatcatttaaaaataaagtcttcgacacctagaacccattactaacaagggagaagaaagattatcttcgattcaagttgttatgaattataaatgtgaggaatgttatatagaaggtggagtccttgaagaactttgtttaacatggaaaaatgcattgatcttaggaagaaatattagatttctagccatgtgtgtcaacttaaaattaattgggcagctcattctatgcactagccttgtttataagccatgacttctcattatcaaatttgatttggaggaagacaaaaatgaaattactagtgagaaacttggaagttatttatgttagataatcaaaatacgattaaagactatccgtgataattcgtttagttatatcttttaatagatattcaatgtaattgaccctttcattctccatgtatataaacaatccattaatcatgtaattagattaatcttcttttgattctctcataatataatataagaagaaatatttcattatggcataaaaagaattaattgtctctcctttagtggttgcttactcaacattacaatgcaaccaagatctttgaatgatccaaatcaccacagttgtcccattcacaagagcaagtgacccctcaggccaatgcttgaggttaaaaagtgcaagatgctaataagggtggtaatgaattaaatcaattcgaaaataatttaaaactcgaattgataattagtttgttgaatttgatccataaactaaatgagttgaacttaaactaaaaaatctactcattatttatgaattttaatttattacaattttatagttttaatagtatcattattgaatgtttgactttattagttcttttagtatatcaaataaaaaaatggaataaaaaaactaaaaagatgaacttataatcattatttcatatatcatttgtaattatttgtaatgcaacaatttgataatatttagaaaattattaatatgcaattataactaacatcaattatataaaagaattacacgtgtttggcataataatataaaattttataaaagattatattatatatttactatcagaataaaaacaaaaattgcattatatatataaacaattcccttttaagttactagaaagaggggtgtcttcctataatcctatcaccctcatgcatgcagcaattgtttctaagatcagaaccttcttctctcgctcttggaagttgtcgatcaagcacacttacagattatgataactctgataatgttatttctgtttggcctgcgtgcccttctggtatagcttgtattatccaagaagcacgagatgttttttatgttagtcatagattatgataattcgataaattataatttatagctaatttatatatttgtatattatttttaaaataaatgcaattaactattttttatggaagttgtagaaattattctttaaattttttacattcttaaaaatataaaaagattaattatttaaattgactatcttcgattgagtaaaataaaaaaattagttaaatataatttcctaattgatttattcatatatataatataaattttaatttcatatgataaatttatatatatatatatatatatataatttgtggttttaataaaatattttacacaattttaattattatgcaagatacaaataattagtggtacttacatattaataatttttaaaaacattaccaatatatattacaaataattacatatgataaataaaatgatagttatatattaatacctttaattaattttttatataatttttcatatctgatattgttatttttaaaattaaaatttaaaaatataataaatgaaaacataataaccaataacttaagacactaagtcaaatattcaacaaggacaatattaaaacccattgactaaaccctaattttttttataaactgtgcattaaaacccactctttaacaaatgtcacctaactaatagtataattcataaaataaaataaaaaataaacatctaaaaaatgttcaaagtgtcctaatttgagcgaggaaaggtgcgtgtaagggcaatattaaaatcgtaccattgtctaaaaccctataaaaaatatattttatcaaatgtgcattaaaaatccactctattatagatgtcatataattaatacaactatttgttctttaaaggagtttttagtttaaatatattaacaaaacgggatcctaaattcactcacaatgtagcttactaatatacattgtacacccaattgttttttagttagagtatattaataaattataaccaacaattatcttaaaatagtataaaatttattaagatacattgaattattttttagttgaatttcattaataatgtacataaaaaattatggataaaaaactcaatcatctatctcttctaatacctacctaccttgatttaggattatgatagtgatagtaattagtcatttaattttaaaaattaaataaaattaaatgactaattactaccactcaattctctttcattcctctctctctcactcttttctttttacatattcatcttctcctcgccaccatcattgaataatatgtcatcagctcctgccaccattatttcatcaggataaaaataaacagtttttttttttacagaaaaaatgaacagttaaaacaccaacgtactgtttgtagtttgtaggtgtgggtaatgctagtgtgaactgtggagtgaaggcactcttgggcagcattgaaaagttaatggtgggatccaaattttcatctcaaaataatgtgcttgtgattacagcaacagttaagctgtgattgttaaaattgtataaaattgcaagtaacaaatgctattaatattatctttttgtatgtgcatataaaaatattattaagcaagtcaaaaaatctcaactgacaaaactcttatcaggttcatatcacctcaatattgttaatcaatcaactattagagaaatgggtaattctgtcttttactgatataagtaggggaataaatgtaatttcacaataaggggaagcatttttgttatgagataaatactttttcgtttcagaaaatatacctgtgtgcaattccgtgcaattccgttattctgtttttcttccatctccttcttgctcatcttctccattcttcttggtgagtttcttggtgagtttgtgtgtgtgattcaagtttccattgcttgatgtgtgctagattaatgttctagatccaacatcaacaatttatttaaatccttctatgatgtgactaagtctctaaaacatctatatctacttagcaaaattcatcaacattggaagggtaagtgagaaaattttaaacaataaccttctcactaggaccaaaaataaattaccctctactcattctagaagaaagtgaaaagtaaaaggaaaaacactttgaggagttgaggaaacctagcgaactatgttaagtcaacaaaatgacctcggaacataagttaaggcagtgagaaactggaacctttgattggaaacaataggaaataacgtgtcaattgatttggaggatctagtaaattgtgaagtccaaacaaaaaattagcatccaatcaaccaataacaggctaattggagggggatgttccgaatattggatgacccaaaaacctaatatatagcaacccaaaatataaaatagatggattaagtcctctatgctaagcaatacatgcatgaagtaccgaataataatcaagaaatatttcataataatatgccaagaatatcacgagagaatagattggtgcatcatccatgcacacgagggcagcaccacgtcaccacctaaaaaagctcattaggagacttaagtacaaattttaatttcttaagtatttgcaagtgacttgtttaacctcacgtgtatgagtagtgatctatatatcctagcatagaagacctaagtatttggaggttgcacattggtgggtatatatatttggatgcctataagctatcctattgtggctttttatatgatcagcatatttgcagtgcctttgaaaacttagaccacattgatcttagttataagactgactgtttcatttttgtagacacttagatgattatatataaagcgttttgagatgaaaaagaaaattctctattacatccctcacatactaatttctacatcaccgacaatgccagcaaatggaaaaaatataattaaataaagggttttgatggagagaaatacaggctttagggcttgtttgtactttaaaaaaagtaattttaaaaaaatgttttatttttaaaagattattatattaatagaagctaaattgtgttagttactattatgaaaaaacatttttaaacatagataaatcttttttttaaaaacaaaaatgatatttatcccattactatgtttaaggaatatttttattaccaggtctattttatgaaaaattttcatgcatttaacattttttacttgaaaccataatttgattttttacttttcaaaaaaacaatatgacaagattaagcgcagaataaaaaaaactatatgacaagattttcatatcattttctcaaaatacacgtttttttcttcttcatatcattttctacacatctcataatattacactagtcaaggaacatctcataatattacacaagtcaagggcaactttgggttgccaatagagatattctccatggatatacattaatacataaaaaatattccagaaacttgtataaatcccgcaatgcatttataactaactgaaaagctctccgacttccttcttcattattcctttaacctgtgtgagaattaaagcaatcatagttacatgtcaataactattgaatttttttacatttataatgggtaatcaaacaaaaattagaaagaacgtgacaatactacgaggagaattatacctgctttgccgaaagcccaatatccttcaaatcatccagctgttaatgaaaagttggttcacaatcacaaaattgtcagatgtataaacacatttaaccggtaaaaaaaatgacaaaggaaaaactgtagtgggaaaacttttattaagaatagggacatacactcttgaaaggctctggagattcttctcggagttcaagtatgaaggtagctctcttctccccgattccctgtaggaaaaagttcaattagttataacccaaggtacactagaaaaaaatatcatcttaacaaaggagaagtattactgaccttcaatttttttaattcctccctgttcatattcaaaagataaaagaacaaaagataaaccggtgagtttctcatagtaggtataaaatgctgactcatttaaaggctataatatattttatgacaaccacatgaaatgcttacttgttagctgtatttaaaaacctgaggtattcttgaacaagagaactctgcaattcaaataaattgtaagttaaaaacaataaaggacacaccaaatgtaatcatttggcaatattgtgaatggatcagaccttcattccagaacctcgcatgctgaatgtctcccagggacttttggcattcattgcatcccatctgttaatgctcatgttttgttcaattgttggagtttttggttcaacaatatcaagtggaatgggttccgtttttggtatctgcatgcatgatggggttgaagaatatagcattttaagactattagaaagatcctgcaactgagaactgataggtggtgaattaatagccaatgaatcatctctgattgcccttgaattgttgttctccttgtttatgctatggtctgtaaatgacaaaaaaaaaaaatcaatgtagctgtgtatcatctgatcagtcaaacaatcactcgaaagtcatcaattgacgaaccttcctgaactatttttgccaatacttcagagtaattactagcataaggagtatgctccttttgatgatcctcctcatccaccgaaataccctacataaacaaacaagcaggaacataattaagtgtcttctgtacctaagtcaaggcattcttgtaacaaccatgctaacattttagtaccaagaaggttttgataggttttaaaaaatgtctaactgaaaaaagaaaaaaggaagatgtgtcagcattgataaaactacctgatctgctaggggattaagttccacttcaatgttagcattaaaagatgaatcatcctgtatagagtgtatttgtcagtttctttactaaaaactatatcaagtatcaattgcaaatattattggctaagagacggtccaaatcaagatcaggtcattacattttgcaccatcagatcaagtttcacgttctctctagcttttgaaaatgagtcatcctgcataaaacattttggcaatctcttatgaaacaagatgtctggggaaaaaattgaaaacattctttttgtgaaggttttaatcatgctaggatttaaggtaaattatttattaccttttccactccagagttgagtacaacatgatttctggtcttcttttccattccagagttgagtacaacatgatttctggtcttcttttccattccagagttgagtacaacatgatttccagtcttcttttccattccagagttgagtacgacatcacttccagtttccaacaatgaattgtcctgcattagagaccaattgatgcattgagcttcctaatttaacaacagcacaagaaaataaaatatgaaagatgtattaccaataaagactttgatgcttgagtaacttgggcaacagcaatttcctgccagaaacaaaatccattaatgacaacacttcacatagtccctacaaatggatagttttatttatttatacaattttttctccacttcaaaaatgtcctaatttatcaataagaaataaaattataatctgtactttttgaatggtcgaacattgaaatgacaatgaccttgcctgtatcaaaaccatttatgcttggataaactaagttctaattttatttagttcttagttccttacaaataaaaaattactaagggcacacacacatagagagagtgatatagataagagtgatggggtgaaaaatattttattatccctctctctgtctgaaattgacttctatgttttagttcaaattgagctagactagtatttatccctctctatctgcatacttgttcttacaacccctcctctcctttgagccaaacaaaaaaaattgttcattctcatgtgattaagaaaaaaataaaaacaatataaaatatttagaaaagaaagtctaataccttctcagctttagtaacagagtgactggcttcatcaaacaatttcctttataataagaaaagtcaatatccacaatttgataaaaaatacaaataacgaaaactaacaaaatatgtagagaaattcagtacaaaccttccttttattgcagacttcttagcaacaacaacttttttatcaagtaatttagaagaaacatgtaatttctttgctgttcctgaaacacttttgggtatctggttcttatgagaattcaccatttgttttgctgaacttgcatttctcttggtggaatctaagaatgcccgatgaatccaatgacatgaccgtgatgccaagctaaccatgtaaatagtgtcttggcaaaatgatgggttctaaattcacggaaaaaaagaccaaaatcaaagttaaattactgacacacaataaggaaagaaaacttgaactcaaaaccagtcataattaccaagcatgaaaccaataaaattttgctagtccccctcaacgaatcctgcagcatgcgtgtaattttgctttcccggtaggcaacacgactttcatttgtactcaaagcatgacaaacattcaataaggcataaattgacttgttaattttgttaatctcagcaaggtaggatccatcaccacttttctttctagcatcttcataacctgaaaaaatgttaaaagtataacactgctagtcaaattttaaatgtaattaacttcagtatatattgtactgaagtagttaattgactagagtcacagttacattacatctgtgtaactactgtataagatgaggtgtaacttttttctcattgggttgaataatatttcacttcacctctgatattttctctctctcagatttttataaatgtcaacatgagccagaaaaataaaaagattatttagcatctttcacttgagcaatgattattacctgccaagtcaacaaaattcactttgcttacaagacttccattctgggaaaagacatggacgattaatcccatgtggcttctatgaacatgttcacatcctccttttttgggagctcccttcagtgcaaaacatgcagaggagtacaaattctgaaattcagcaatggatttcacaagaacctgccgacaaaagcataatgcaaagcccccattttacttgtctactgtccatatttgaaatctccattttctctagtctagaaaactgagcagcagaaatagttaaaaagatttctacctgagttagtcctttaaactgaattctgccatgatcttcaaaaaccaaaattggtggcttctctggatttaataaatccatggcccgctcctgatgatcaacctcatagaaagaaacagctatgtttttcccatttttctcagccactgaaagaaactcagcgatagcaagcactgccaaacctggtctctcagcagagcccttgaacacccaaggagtaattgttagcaaaacaatacaatttcatagaaatcaccaatcaaaattcttcataaacactccctcgaccaccaaccaaaagaaaaaagaagaaaagaaaactaacatgatgactaagtgagtcaaacctgaattgcgtgcgtctttccactacccctagcaccatgtgcaataacagtgctgttatgaccatcaaaagctgcagacacaagaggcttcacctcccttgaatatatcaattcattatcttcatcttccttatagcaatagtccaccgaataccgactacacaacaaagattaaatcaaatgagtgccatgattccactttcatcaaatcaaacccacaagaaaattattcataatagtttgaagaaaaaaaaaagaaaattcaacttcccagacctaagagacattaaattttcaagattgtaagtcccgcttttaatttgttttatctacttcatctaaaaaatatatttattattattactgttactgttccttttactgttactgttactgttactattactattactattcagctgtactcatgaaaactctaattctccaaacattacacaattaaataaccacacagcctcaagatttaggggatatattattattcagctatgactcatgaaaactaattatccaaagtctaaacattacacaattcaagaaccacaaaccctcaagattcagaggatgtattactaaccaggtatgattaatgaaaattctaattctccaaaccttacacaattcaataaccacaaaccctcaagacttagggaaaatattattattcagctatgactcatgaaaactgtaattatccaaacatcacacaattcaggaaccacaaaccctcaaaactcagaattcaatcaatttcttgaacaaaagtaaaaagaaaacactacaataacaatacctggaagattggtctccgaaggagatggtgacatcctccaaattttcgcggttcaccgaaacccactccaccgttctggaagcggcaggttcggaattagcctcgggacccgcaaacccgcggatcctggtgacgacccgaaccttgcgactcgcgcgatcgaatcgctttgaatccatagaagagaaagcgaaagaatctaaaattcacgagagagaagaaagagtgtgttttgatttcgaagagagagagagagagcgcagagaaatgaaaaggagaagaagtagaagcagaagcagaataggaagtagccgttggatattggaacaaatatttcaaaaattttctctcactatctctaacgctccaaatataaggactctttagtcttttccattactacaacacttctcgggcacgctatgtagtaagtaagccatgaattaagctgtgcgttttggtgtggatattaaatatggtgtgtttttgttttggtttttcgattttgtaaaaattctattttgatttttttataaaatattttctaatgtttataatcacaactacttttttacaataattcacgtgttttatcaaccaataactagaataaccatttgatttttataaattaatttttaaaagaattgttcaattctcatcattaaaaaagttatacactaaaaaatacacataatacatcaaatttatgtgtgtaatgttaatataaagggtttatcatcgtaaattagtaaaatcatctcatataattaaagtgaataaatttatcatatataataatttatgatttatttaaattattattgtaaaatttacattattaactaacaaaaagaattattattagaacaactttatatatatatatatatatatatatatatatatatatatatatatatatatatatatatatatatatatatatatatatggtaagcttgtatatatgacactatctatatgacactatctaattgaatgaaagtgtatttttttaactctatcagtatattctaattaaattcttattaatgaataatatatttcaacacagtagtaaaatatttttatttattagttaattaatatttttatgaaaaaatatcaatatattttttcgtattaatcaataatatctttaaatttttatttatttataatttataatttttttgaataacttcctgtaataaacagattcgggaatatcatcgagtttaaaagctagtaatttagtaaaacaattgatttgattttttttggtacataaaattttataataagtgttataagatattggattatacttttaggaaaaataggttatacattaatatgtaaaaaaaaaaaaattgaaaccaaaataattatttcatttccatcaaaatgtaataagcaatttcaacgatttccgtgttgtctcttgatcaaaatgtaataagcaatttcaacgatttccgtgttgtctcttgaaaatcacacaattttaaattaaatcacaaaattaaatattaacacaaattaacgatggaaacagataaaaaaaaggacagcaaaaaaaataatttccttagaaacctaatcttaatatttggcaggagagatttacattgttgaacaatgcttcaaaattctaataagtcttccctacaactattattaactacaaaaactagacgttgacagtgcagtagttcaatatccacatgatccaactgcatgtccttcagccacttaattgcctccaatagagctaattaaagcttcgctctcaagtgtaagaggcaaaacattcctaaaatttgatctagttggtgccataaatttacttcctctcccagcagttgcatgcatgctcacagccaattaaaatatatatgccactcattctccaaatgcacttcacatatgccacacagcttttttagtagtattagttcacccttttggtctgaagattcattcttgttggcatgataaaatgagtttatcatgcgctcaatctcctccctaatggatttaggtaataagaatgcacacattcaatagctcgggattgctatatttaccttctccaagggcctttgttactccaagaatagacgcaacaacatcacgctggggcatatatagtgacattcttggtgtagaaaacttccgattttgctaaattaatagcttggcctgaggcacatcctcataacgtacgtgtttcagaattttcctcatagccatacgttccctttcatctactcgaaaaaataagaagctgtcatatgtgaataataaatgactcacaataggggcacctttacaaaattgcactccatgaatatccccactagcttttgcttttctgatgagtgttgtgaatcatttggcacataagataaataaatagggcgataagggtcatcctgtcacaatcccactctggcatgactaaactacattttatgagttaccagaactgagtaggtaattgattttatattgttatttcatcataaatatgtatatgataagtttattcatttttataataattatcttaaaaatatatcgataataatttataatttataattgatttaccatataactctttttccatcatagcaataataatttaagacttttcagtcttgtaagtgtttttcttttatttttataagtgagcctttccgttctaattaagccggtcaagatagatttggatgagttatgggtttggatagctacctgttacgaacagaagtgataatgctgggttcgaggccagcacctctagaaataagggggggagaagaacagagaaaagcagaaaggagaggaactttgctattttcattcatgtctgatttggttatttacataggtatttatagaattcttgctaacagaataggattggattacttgcaagaatattctgcactaacagaatttaatattctgcactaacagaatttgtcgtagttgtctagctatcgggaacaattccaaatcaagctatatacgatattggtggtgctgcatatgctgaagatgaaatccccgagctgccctcaagcatagtctcgaaggtaagctggtcttgtgactctcctattgggcttttccttgatctgcacccttgtatgttctgcttggacctctgctgattgttctgtttgcaccctatcactaccaaaatcaattttcaattttttctgtttttgctatgatgaaatggttattatcaagggctataatttatttcccctaagacaataagcactggctggatttgacctagacgacactttatggctgtgtgtagaattttctagcttgatttactgttaccgacatgtgtgttattattgaacataaaatgctaaatttagagttcttgttttagtttttcaacattgcattttacaatttaatgtttatttcaagttatattatttggtttaatttccttgagtatatggtctgttcatgtgatgatgatttacacggattccccttgaagatatcatagattgtgcaaatctgagtttctgatgctcatcaagtttacaatattgtgattccagctagctttgcacgaagatgcttgtgatcagaaatatggcaagacttttacaatgtgatcaggaaatgaacaatccaactttgcatgaagatagcttgcttgctatatgttactgacgatagctcagaattggcagacatgcagaaaatactgtaaaatatcttctgagaagatttcagagattccttatattgagagtttatttacagcaagaagttgcctccctggagcattccacatttttaataaatatacatatatacatatatacatatatatatatatatatatatatatatatgatcgtcgatgataattaccaacaatatatagaattaaactaaactgtgaattattgtatcctttatgtgatctttgggggttctgtgatggtttgtacactgtgttggtaatttgtgtttctggtttttttttgaggttttgctagatagaaccaaagggaggttgaactttgttctaggtatgttctactgttttggctgcaacttttcacgtcttgtgattgttgtttaattagcctttttcttacaacaacaaattaaactaaacttaatttatactaatcaaagtacatagcaggtctcaaccacctacaagttatacgaatccaagaaaatttgtaagttataaacaaactacaagttcattcctcagcatgcaatttcagttgcagatctgaagtcaaaaagaaaattaaggacaatcctaaagcttccaaatctaattggcccacatttctctctactttgagctaacgttgatgttgatgtgcatgtggagtaacatttgtctgtggaaaagtttaatgaaaataatgtcactatttctctttataaaaatatttttaaacatgcatgttttaaatattagttccatcaattcatttttattaaaagagagattatcccatactgaactgaccaaatactcatgtaaataatgtaaggaaatgaaaattaagaaaatagtaaacattataatgaagaatctattctagttctagattatcccatgacaaaatttaatcaatacattgtggttgaggtggttgagaggaacataatgatgaatttatggggccagttttggatctacaaatctagctagcattataatttataatggcacttttcttaatttacaactctttgtctgctagctctcagttccatttacgtgaaacctgagaggcacatgcattcactgcacatatttcatctacattccttttttaaataacaatcttaatttctcccactaactatccactataataattcattactcatttttacaagacttcaattacttctacagaaataaatcatgtgatgggttactcgaattcctcttcaagacatcaagatgacacggagatccgactttttgttttggatgcacgtgttactaaaataaataaaaaacatgattttattaaaaaaaaaactcaaattatcataatttcatgttacaataaattatatcatatcttctatatttttgagaattaatttggtgcttaataattagtttctcatgttgaaatataagacaatatcattaattttaatagctctcttatattaattataacaagtcaatttgaaggataaattgctctcatatttgtaattaaattgtatattcaagtgtaagaattcatcaatatgatagaatttaaattttggaaaacagaaatattattgggagataatcatatattacgaaatcattaagacatttaacaacttgtcccacgatttattaggaaatcaacaatatttggtaaaaataagcttataagctaattgaagcttatgagttataagttattttgaccgccttataagttattttcatcaaacttattttgaccagcttgtaagttgttacaaacattagatgcatatttattttcttagttattattaaacttgaaattctattttttatattgtttaatgttaaattacttattttaatgaattaatacattattttttttatttaaaatatttggtcactaaacaaaagttgataaaaaataaaaattataaggaaaacataatttttatttttgttttaagataatatcattaataaaaaaattaaatattaaaacttgattttaaacagtgagtaaaatcaccaaatttttactatttttcatgatacaaaattattatcctactttttaagatgataaattattgaaataaatttaaatattagaaaagaatatgtcctttcatcaatcaatcttaccaagcattttcaatcaaatcatctagcttataagcttttaatttttcacttctagcatatatagcttataagcttttagctaactcataagtttttaactaattttacccaacgtaatttaaataatttaaatcattatgtgtcaacactcaatacatcactaaaagaatattcaaaaaaattacatcaaattgaaatctaaatcgtgtcaagttctaatttcctatacactatttccagcaccttttgatgtgcagctcaaaagaacttgaggaaatttttaaaaaaagcaattgataattccacatgtatttctctagggagaataattatataaacaaaaagtgtaaaagtaaaatcaacttgtgatcagcatgcattacaacttttcctacatgtaccataataatcaggagatccaatcatgaacacagggtttcgttgacattctcccacggctgcccaagcgggacaactgtcatcttcatcagtgcattcaccaccatctaatgtggctgagactttacctctactaattggttttgcatagaagtatttaattgcagaccacatatcaccctcaaggacagggcatctagcatggaagctactcttgtcaggagaagcacttgggtgaagagagaaaaacagaattgcattcccttttactggttggagaatattgctgctattactacaacttgaccagctgctactcccaggctgaaaatatacttgacaagattaaatagtgtagatacatccagaatgaggtggaaagtaaacagcaaacagaagaaaaacttaaatggccttaccactgattcaggaaaaagaatttgacccccttgagtaacatcatttgagagatataaaataattgttgccattaaaggtccacttaattctaattgggttttgtttgtaaaataatctaagttccgaccattctgctcaggcccataatgcatgacctgcaaaggcttgctgtactctggtggaaaagattatcaacaaacaagacaattatatactaggagtatgtgacataagctgactataatggcctgaactgaccaaatagatacctttaggaaggaaagcccaaactgaaagtctttcttcaatccttgcaagaatatcatcctaacacaatgtagaacatcatcataacaatgtccacaataccatgtcaataatagtaatagactgttcaggtcaagcagcaagcttaaaacaacaagcagttgcagaactgtgatggttgtaccaatctcttattaatggaaaaaaaaaacaagactaaaaatgacttcaagctttctatttcagtataatagaaacattgatatgtaaaagatcataattcttttaaatcaataaggatatttttatacactattaaacttatagttacaaactgcagaactgtgagcagttagaaccttgaagtatatatgaatagatacactctatgggacatgttttatttttctgcaatttcagaataaactcttatagaaagagtgtacaggattttacccaaagcccatgctgaagcctggcagtttactacaaagaaagtaaactgatatttattttttatgaaaaagtaaaattgatattattgatgcgaaaccataatttaatatatgttataagttatgattgattgagttttgaaccttataaattattcaaggaaaatgacaagatatgcaagaacaagtagcgtgataaatatcagacttttgaacacttgatcaaaaaaccttttggtattcaattaaatgaaactaatttagaaaaatatctaaaaagtgaatagcttttattgtgtaagggatagtagtagtagtaaaaatagttagaaacataaaattaggggctaaaaccaaaaaaaaatgcttagttccctgcattttttgggtcaaattccccacatcatgaattttgaggattattaggttgactgacaaacaaatcaacctaagacttaagctattaatcgctgcaggcttaggaatatatatacctaacttacaaaggagaagctaaagctattaggtgaaaaaaacaagaacagtttatatctctagcagagtgaaaagactaatctatcattcacaaacccttcacattggcctagtattaagtatcctgcataaggaatatccagtaagcaggattttcacaattccagaaacccacacataaataacatttcaccattagtaaaactctgaaaacaacaaacaacatgagaatcaactgaaacaaaatcctttatatgcaaacatctctcaaagcatagttcaaactataaagaacctataaacagaacctaattagctaaattctagtttctccaagtaggtacagaaaaagttcaaactcacttccatatccaaggaagtttcaaccccctctgaaaggccaccgttccctgaggatttttctttcacagcatatgcctaggtcagaaaaaagggggttaaattaaaaaaactagcccaaatactagaaaccaacataaaaaccattgcaaacagaaacacatcttaccaaagaaacaaggtagtcacactccttgtccgacaaaaaccctttgtatagaaaaaccctacagcaagaggggtaacaatacatcagagttagaaaaataaaaagcaagaaaaaacccggctagtaaataagaaaacaaattaaaagataataatagaagacttgcatatcttcatcagtaacacaatcactaacgatataaaggaaaattctagaaagtacctgaccttggttgccaagagatttggacaacacgtgatggattaattctgttggaaaaatgaattgagcgctctaacatctgtaatgcagtttcctgcttgttccttaattccttcctactgctaatgcaaattaacaatgagaacaacaatataaacattctgattagtaactagtaaacaatcaaatacacaacatcagtcatgattcatgaatgatgggaattaaatccaccccctggttctttagttttcaaaaaattagtcctcgagatcttattatgtgagaactaatgtgaacaaaaacataaaggtctggtcagttaggtatgagaaaatatcttctctcattttcaatttttacaaataatgacagaaacacgactttatttttactttgcttctgatttaaactatcttttgggtgaacctgggcagagactaatcactcaagcttaccacatctattcgaggaactaatttctctcaaaagatgttcttccatatacacaaacttttgaaatcgaacccctgacaacatgcttaaggggcatcaagcatggttatttttcaaccatacaccatcattttggttgatttaaactatctgtatagtgaaccttaaaccttaatagtcatactaacgatgaattctgattgtttgacacttacactgacacttgacagaccatagaaattaaactattataaaactattacgattaaaaatagggagacaaacaaaaacaaggccgcattttcttaattattcgcaaaaacaaaaaacgttgctcaaaccagtccttcttgcacaagtttcagcaaccgtaggcataatttgcactgtttattagcccatgttactaactattactaatatcaggacaaattgcaatccaatgagattcaacaaaatttcactcaatgtccctcctttttttttcacctcactcaaacttttatttatttatatatcaatatcaacaaaacatcgaatagccttttcttcacccaaatctctgatttcttattcacattaaacttcaaagcgtgtaaattgtgccaaaattatagcaaaaatggtgaagagagagagagagagagacgaatggcatttcggcaatttacctttcggtaagagaagtggcaattaggaagaacacgaacagggcgagaagaagggagatagaagccatttgagattggtgagaatacgaagaagcgttggaaaacaaaatcggagatcaatgcaacaaaagttctgtgaaattggaaatttcgaattggcagtgatgtgatttgacgcggctcatgattttgcttctctaagcagtttgctttgcttttcttattccatcattctagtaagtttgctaagtacgttgaattttataataatatcttaattaaaagtaatatttaaaaataaataaataaaatacacacaacaatataaaaaattattttatattattatttatttataaatagtcatatacatgataagttatataaaaaataattcctgataagttaactacttaaaaacttttatattaataatatatgtcaactagattcttaaaaaattgaaaggattgttgaaaggattttataactacttatcacattttattaatttaactacgattggtctatgcccttgttttttattaaaaaaattaactatagtcacaatagaaataattaaacacatactttaataaatttgaatataattttaatatttataaattttattttgattctctacgggtgttttatttttttaaaatataattttgctcaagataatgtaagacactaaatataagtatatctcttcaactagagatgcaaaccttgtttatatatgttatgaagtttgattttgtctctaattttttgaaagatacaattcaagttgttataataactttttttttcttgtaccgttcctttactaatctcttgtttacattttttaagtatttttttctgttcatgacataattacaagttttaaaagtgaaagaagaaaaacttgctacatttaaagcaaacccatgtgcagattgttcggccaatttggattgtgtattggagtccccactcaactaatttcagctatggcttcctgcagttcccagttgcttcttctgcacaccatttttgccttttagaatattcattctggaatataaaattatattgtggaatggactttctttttggctttcaaaatcatcaatctaaaaaggtcaaaaaatatatttcaaaaataatgcaagaagcaactttggaggtgcaagaaacaacaaccctaattttagttctcttttgttttgggcctgtgccctttcctttccaaaaattaaataaataaagatttttttaaaaaaagttattcattttaattttaaaaatgcataatttgatctttatgtttgatgttgattatgtgtttttcccttaacaatgtttgttagtattttaagtttcaaaataattaatgtaaaatagtaatagtttaagatctatgacagatttggatcatgtggaagggaccgagaagggaatgtttgggtgttgaaggatgagagagattgcgcaggaaccgcaattgccgccattgaaggaagaagaaagagcaatgatgttgttgtttcattcagttttgtttggttgttctattttttatttttagatcgtaacgattaattatcactactttaaattaattaattcaaaatttaaaagttaaccaaataataatatttttgacgaaaaaatgaaaataaaaatactataaataaaactttcgaaaacatagaaaactaaaattaaacattgcaaatttaatgcatcaaacgaaacaagtgtaaagtgtaaaatttaatggattgttaagccatttttaaatgttggatatttatttcattataggaatgaatcctggttcccattaacatgtaacaatttatccttccccatttcaagttccatctgggttacaataagaatgaacgaattttgctttttacaatgtatatatatcctcaagtctgcaaaaactagttatttaatcattctttcttgagcacagtgtggccatgctcgtccttatcaaaatgacgctcaatcaatgcatcccagctttcatccactgaacttttattagaagactcaccctgagatcttgttgagttctcatctccctcatcatcaaaagtgccatactctgatggcggtgtataagcatgtggaacatctaatgttttggccctttgtaatgcagctttatattcgtcattgtgtctagttagcgtttcctgacgctccatcttttgcttggcagggggttccatgggttgatctttctccagcatcaactgcaattgatgtaaaacacaagagaaagattaactttggttcattaaaaagcatgccaaattagtggaatcggattccttatacttgaacacttatctatgtttttcttacatcaaagagtgccagtaacatgctcttttcaatatacttctgagttgaaatccatgcatgagtcccactagtttcgaaattgcatctacttatttagtgagaccaacatgaatttaatccaataggagagtgtgtcaagaagagaatatttgagtgcgttgttagcatttctcaaggaggaaaaacaattaaaagatatttgcttaattcttgctattccacgatagggagatataccggaggtgtacaaattgttattgatatcaaattacagatccgtcacaatttataaacatgtcttccaatcattttcttaaagtttgggctaaggcctcgatccaaaaaaattgacttgtaaaatgaggattgtttaagtctataatggactacataagtcatatctctagtaaatgttagatctcaacacccctcctcatgcctgggactagacatctggagtgtaaaccaatgtgggtgacccaataacaacatcccctttcgcctaggaataaacatctacaacgtaaaaaaatatgggtgacccaataatagatctaagataggctcttttagaatttgagcttagggcgtaactcaacctcaaccaccttgtaaggtaaggactgcccaagccttatacggtctacattagtcatatctctggccaatgtggaatctcaacacatttccaatttgaggggtattggataaacgggaactataacagagcacgatattgcattcacaaccacagtaattatggaaatcacaaaaaaaagaaagacatagaataaaacttaacttatcccaataaacaattacacttacatccagagctctttgggcttctttctctatccaaatgatggcatgatcagatgtggcattacaagaaaggactatatgctcaaaccttccatctactggcactgctgtcctcactactgggggaaaccttcccattctgcatataagacgtttaaatgttcaggcgaggcctaaagaaaaggttgtatagacatcctttttacatgaccatgttaacatattttattgtgcaagaaacaagagaataaacacggtcagacaattaagaagaaagtaaagtaaaaatgaaacttcccaaaccactgttagaattcagcataaggcaagactctgttttgttttcttaaccatacctaaaaggcttccgctcaacaatgtgataaaggcgaccgggtgcatagagtctcctgggatctctgagcatcttctcctctggaatacatgtatccctcatgcacctcaagcacaataggcatggcaaactgccagccacagcaaaaaacaaattatatcaacatgaacacatgaaaattacacaaatattggtttcactaattgttagcaacccttttttacagtatgccaattaatgattgagtctttccaagcatagaactttttctaaaggggaggggggcagtaattcattttgaaatttgaagtggggacaaagaggactgaacattccatccttgtattgatagtaagaattccataatttcataagtccttaagacataccagaaaagagacttgaatatatcttccaatggagtggctgtccttggtaagaaatcatcctgatcaaggtaaagagtggtcaacttcgaaataacagattcagtggcatcaagtaaaacgaagcatgaagaaagactagatttgtaatgcagcttatgctcaaagcaactaggctacaattctaaactatcataatgtatacagtaagtttaagcaatatactaattataagaataaatcaactactaattcattatgttccatatgaaacagtctttatccaaatatttgacctctattgagcagactaatactcatgcaagatctccataaattatttctttcttagcatttaaatgtgtccattcatctctctgactgaaaaattgttactatggatataatggttttcaatatatagagacactaacaagcacataacctcccacgtgtgaagttagctgaatggacgttaaactatgaaatctgaaggtgagtcatcattcagaaaaccagataattttatgtacagaaatctgtagctctgactctgagataaactgaaaaaaaattctccaaaagagaaaaataagtgcaagttatatactttaattagaggttattggattagaatgggacactgtattcatttttcatccctttaacctgtttgtaagtatcactataaggcattcatagatttcttacaactctgctgaatctttggtctataaaatttcactactctttactgaatttctatacacaacgcaaaaaattcatataaacatacatcaaaagaagctaatttaaagcaaacctgttaggtcagttagttagtgtattattaatcagttagttgggatagtaagtccgagaaatacaaggggttgtgttgatgggcctgcaaatagttacccccgtaaaaggtgggtttatgttagcaaaccagtagctgcctgtaaataggaagagaagttgaggagaagaagctgtagtgtggctagaaaagaagtggaagtagagagaggcctagatcttttgaatatccagggaattctttgtaaagatacacataatcgataaagaaattttgtttttcttccatttctaatctagtttctatcaactggtatcagagctccaatcatggagatttggggtagtgaatagctgaaaatgatttcaaaatttaatggaaagatgaatccaagatttgggctgtcctggcccccactattcaactgctagaccaagttttttgcgaggaggacaatgggtatcaagggaatagttgtcattatgataccacgacccatgatctgcaatcaggggcagcaatacaaaaatggtgctgctttgttcatggcaaaaaatgcctcagaaaatagagcaatagagaagaatagaggcattcacatatttatgtttgcctgtggggctgccactggatggagtttggtttatagaatgggtaggatacttacattgtaatctaaaggcctaataattttttattagtaacttgttcccagttattttatacatgctttaagtgttcaagatttgttaaggaattaatcaaggatttgcacaggatttcaacattcatcatcaaccaaataaatagaaaaatcaataacttgcctgcagcacaacagagttgatgacatctgcatatctgacagccagattcagtgacatgcacctagcaggtgcaatggcgtaacacctaaccctcttcctatcaatatttcctagtctatctcgattctgcaccaccaccattgtcagcatagctgctacaccagctccaagggaatgtccaacaaaagtcagagtgtaatttggatgcttcgccaccaactccctcaaaacttcacattccgaatccaaaacccatccagcagctttcaacaacccattgtgaacatagcccccatcatactttttcttccccaatttattgtccaacagaaccgcataatcactctcctttgccaaatttagacccctgatggcaaaaactatatcttcatgctcatggtcaagatacagtatatagggtggcgccctaccacgggtatcttcgtatgtctttttgagaagtaacaaatcagggctaattccatagccgccaggaggtgcccaaagggggtggcgaagatcgtcttcatacacagctaaaatatagcgacaaaggcgtggtataggctcaaattcttccgccgtggcaaagccccaattctcactgtcatggcctgcagtatgaagacatcttttccaagcccaacgagcacaagccagacagtacacgcactccacaagaggaaggccacacaggattgacattgtgcctacagcctatgctgctaagcagtataggccgcaaaccaatatgagttttgcacaaatttcctctcaaggacaatgactttcttatacagtagcaacaaatatgaacacagagtggaaaattgaagcttaaacttaaaaaggggtacaatctcttccttgtacaacaagcagattatcaatatacagattgtaaacaatcatggatctagtgttgacttattgtagcagcagatatacaattttggatagatgactgcaaatacccacaattaactaactagtaactaccataaccacggtgaccaacaaagaacctagtggaaataaacaaaaactgcaacttcctagctagaacagttgaatcttctagaaaaaacggaggcatatcaagaggggatggtagaaattagtacacaaaatggagaatccagtgaactcacaaaaaattacatgcactggaactaaaaaaaaacatcaaaattgtgactgaaaggtgatcattgatcaagatcacaaattttgcattggtcaaaggacccacacggaacaaggaaagaaaggggaaaaagaaagacacccagtaccgaaattcaacggggattaaggattaatgaagccaaaactccaaaaaagacattttgattaatgggacagagtcatagattgtaatagtgtgaaaaagagtcctcaaaagagcttctgaggtttattactggattggtactataatattattgcagaattgtggatgtaactgtttcgaagcaaagggccagagtcagaactacgagtcgaagtctgataaagcacgtggagattggcttttacattttgcaccattggaggtgggtgatggcactatggaaaagtcacaacctcggaccattggaggtgggtcatagtgatgtcctaataacattaatcactatgacccataaataaattcacattataaaattgtcaaattttccgttaaaagaatttgaccaagcaataattatttcactttatatccttatgtaaatactgttttcttatatgggagaaatgacatttacttctttggatttctttaaaatatttttgaaaaaaataagtaattatttttcaaagattaaccaaacatattaaaattactagtatcttgacactgtatctaaatgcacgtttattttatatttttttgaaaaggaataatcaatttttataaattttctgataaaaataacaataataatatataccaaacttacattaagtatctcacaaaataacatcattattctttaacaaaataaaattatattattagagattgtaattcgatattattattctgatttaaataataatctatcatttgattcatgtatttgaaattcaaaaattattaaatattgatttggatatgtgattgtatgtagaataaatgaaatgtgagagatttaattgtctatcaaatgctaataaatgaaatgtatttatttaattagggatcaaatttggtcgtatttgacaaaaaacttctctggtgacagcattggccttaaggatgtagtagtcatgtagatgataacgaaaggattaaatatattggaatcttctgaactatatccaaattttataattaatttttgaaaaaatttatttttccttggatatatgaaatttcaaaaattttgtgaaaaattcctaatagagagggatcggtgcaacaatttcatagggacctagaaacaaaaaggaattgtttgttcatcaatgttttggtcacaaaagacgcatgagaagcgattgcaataagcgagttagggattgagagggataggggcgttgaggaagaagtgaacgccaaagagttttccgcagaagtgggagagggatttcttgtgtttagcgaagtacttgtggcagagaccttgatcgtgttttatacgctttgcagaactcgaactcttcttttgctagtgtctcgtgttgctccccctaggagtctcctccaccgtgccaagttttcaagccatcacgaaaggctttgtagtccctgcgttcgtcaatggcaagcaagcgttcaggtgtgggttttttttcaagtggacattcttcatgtttttttcttccttttttcatattcaatcattgttcatgacaataattgaatatgaaaaattaagaattaaaaattactcaattttattattccatatgggtttaatttgtggtgcatgtcgaacatgtgtggtaatgacaataacaacaccattaaagtaagcaagaagaatatgtaacttttaaattaagaattaaaaattactccaatttattattctatatgttacgaaattgtcttgttattatgagactgatgacttcaaaagaatttttaataagactaattaaaattcatgtttattgttacaaaatatccaccaaatttatcaataattaatatatataaaaaaacttaattgatcacctgtagttaaaattttcttttcaactacatattattttcctcttgattcaaacttaagaccttgcataaaaaacttatttaattctattcagaccaacaatatattaataattcagccacaatttaaagagggtaataatcaaccacaaaccaatatctttatccagttatttttttaaataaaaaaaaaaaacttattatactaacacccttattgaaatgctccttattaaagagggtttgagagagtaatcatcatgacaatttataatcagcatgctgcctatctttactctagatgtgctgcagacatggcaacatgttgaattacaactggttattccttaactgaatttcttactagtatcaattatacaagcatgccttcacatgaatatgttgtgatctccgaaaggcagttataagaagttagtaactgccaacatccctgcgtcggtgtctggtgcacgtctttattgaaggactgcaaaaagaaaatcaaagcaaactccatctctggccactcaacagccaataagcttgaaaaaatgttgagggtagaaaaggtcaggtcttgaacttctgtgtgaatttttgggtgattttctcaaccccttctctacaatcaccagcaactcgctttgcaccttctttgataccaattccaacttcaagagcattttgctgcaactcactgactgacttgcctacctttgagatggcagcttctccaaattcttcagcctgttttcctgttttgcatgcccattccctcaattttgatataaattgggaaaccacgtgaatgattttgtgaagggtatctctagattttcctctgatatctgcagccatttgtttgagcttgtccaataagctctctgccctgtcaactgttccttgaaccgagacctgctctgaggcattgagccatgtcactccagccgaggcctccttgcggaggtcatcatcaactaccactttgattccatgcctctcccaacgatctctagcctcctctaaggctattgcttgctctctcactcgtttggcctcgtcctctgcccaagccctgtccgagaatcaacataaccatttattaaggatgtaatacgctaacagctattattttaggactggacaatatatgtgtcaaaaatgactttctcttaactgtttcatttaactatgataagcaacaattgtcaataaggcattagtctcacagaaggactagctatctcagtagtgccgaccacgtcagtataacaaattcaagtagatctagatacaatgtgtagtacaaatacaattggaagtagtaaaataactgttgcaaaataaatgaatgcaatggcagaaagtaacaaatgtatggtgatcattcgtctaattaacatatcagtgataggaagttatgtaatttgttcgatttggactaaaatagaaggacaggaaaatatatttgccaatgcttctcaccccacatcacatctgctttggccaattctatgaaaccaaaattgaaaactgatcaaacataattttgttgcctataaaagtttcatgattttacctggccatggacagggcttttctttcaacctctagctcatattgtaaacggccaatctcattgttttcaacttctgctttttcccgaagcttgctaatcctctctttttcatgtgctatttctaccttgtcactcattaggctttgtaattgatcctcaacctcatgccttaactttgaaaaaacctccatttccgattcaatagcagctcgctccttagtcaatgcaaggttatcttcttctctctcagctcttaacctttccaactcaagtcttgcctcctcagccattctttcaacagcactgatcttttccctctctatgaaaagctcctgctcaaaacttgcattgatatccttctctacttgagctactaaagcactatgcgcagcaacagcattttcagcaatagattctgcttcaatgcgtgcaagctcttcactaactatttccgaagcatctccagtagcaagagccatagctgcttgggcttttgttactggtttatctggctggaacaatcttgtataaccttgaatatcccaaccccatgcacaaccccaaaaatataagcataagtgaaaaccgaaaaccaaaatcagactagaaataactaggataaaagaaacaacaaagaaattattatgaatagaaatgaaaattcactaagaagcacatgattaaatatttttttagaattacaaagagaatatggcttaccaaatgcaagagctattattccctgctccccagcagacagatcagctactaaggcagggcatgcattaggatgtatcttatcagtgtctataaaaccagaaagttggtacagcacctgctcatcagtcattggatttgataaacacattcatcagttcaatgtggttggaataaagaagatagcttaaacatatcagacaaagaaacaggttgagcaaccttgctgtcagcttccggaagctgtcttttctgcagggccattttccagctgacaagatcttgacgtgataaaggactgcagaaattaatataggagagaagggaggtcacaattgtagcccacgccatacaaagttaaaagcacatctcaaacagagggtagtgcaactgtgcactgagaaaaatgagatgaaatattaagtctatttttctatataaaaaaaggagaattgcaaaaattttgaacaacaaatgcacaactgcagaggttaaaaaaatgtagccacaaattagatatccaaattcagacaaaacatacctttcaggggagaagtaaaatgggctatcatctccatcaccaaacaactgtatatcacgtcttgaaagcctgctttcaataagtccagcttctgccaagcctgaaaatcaatatttgatattatttagacagaatatgagtatagcaacaagttgtattgttaaaaattattatgatgtcctgtactgaccttgaatggaagaaaaatcagggtcctcgggagtgacatcatcaaatgcaagctcagtagcattgtctatatacatggcaggatacacttttgaaactgtgctcctaacaagttaccagaaaggcacacgtaatgccaaatattacacatgtaacacattttgttattcacatatgcagaaggtagaaacaaattactaccttgaaagagcactgctagcagaaaccaaccagcgagcatattcacgacgtgtacataaatcactaggttgaacatcaggctcaatgacctaaggatgtaataatgtccaagtgaacaatagcaacctttacttatgatcagaataatatatattaacaaatatccacactaaatcagagatatgtttatgaagaatatgttttcatgtgtatctttcagtagttctttaattacatatatcttgctttgcaaatagttgacctgggaacaagcataaggctaccagaaattattgattttagttacttcaacagtaagatagattgttccttgtagaaaatctttggcaataggttagagtatagcttagtacaaatcacagtgaatcaagatggctgaagtttaagctagtatgcccactgggagggggggagccttggtgcaacagtgacattgctatcttgtgacctagaggtcatgggttcaaatcctggaaataggctctacccttcccaggaaccttgtactccgggtcatctttttttattgtgagtaattaaatagatttaagaaataaccagtgtaaatatatacgtaaaaactagaattaaactataaatgcacatagcattatagtcaccttgatacatgagaataagaacaaataactacctttaaaacttgcaatgcagctagtgcttggccctgagcttgatcaacagctgcaggaaccaaaatctttcccggaagcacttttacagctgtagaaactactaatggagcgggaatgccgggaacagagaaaaaggatccagaatttgaagattcagatttaacttcatcaacctcataattatcatttctaacctgctcatctaccaatgtattggctgatgttgaaatagatgatttttcaaacaggtcatttccaggaatgctccgctcttcaaaggaaggctcatttccctcagcggagacctgtggaattttgttcaggtcaaggttttcattctttaaagctgacagaatattctcttgaccagcttcattgaaaaacttaggatctgaaatcatgttatttagctcagaaatgaccacaacactaacaattccagtctcattatcagcacccgaactagaataggtttcaggaaaaccaaaacttacacttccacttgaactggttatttcatcatgttgctcagtattaaggtgtagtggcttagcatcatcatagttgggcacgtctcctggatcaacattgaataggttttctttaagattgggagtagattccactgtatctacattagggttgctatcaaaatctctaaatccataagcattaaaagaatcgacagtattttcagattcaagtggcactgggctttcactagcaaaaactaacttgttatcaaaagctgacacatcctgtaaatcttcttgaacagatatatgtttagtggcatcgtcaacaccatcggaggggtttttgctatcatatatcaactgggatcctatgtcagaatcatcaacaatgctattgtcactgtaaaaattactagactcagcagaagaataatccccagatatatgtatctgaccttccattttaccatttccttgttccaccgtgttgtcaacattcccttgttcagttatttcattattatggtcatcagaagacaaaagttcctcctgctgtgaagtcaagggcttcatgtgttgctcaggtcctgcattcagtgacacattttcaattttcaatacggaaattttgaggttaaacaatacagaagacaaaatcaatttactaaaaagcaggaaatctgttacatccaacttggtgattatcacatgaaacaagaaaatgaagattacttactggaaccagtttgtttgccaagagataaggcagcaaaggtaagccctgaaagtagaagcactccagccactcctactcccacaactcctgaaagcaagctaccttcaaaagtgttattaagtaacgtggaattgctaaaacttcaaaaaacacaacattttcagtaattcacatcccattatctcaatttcccaaccatgtttattaatactagcatgcaatccaaatccattaagtcaataacccaatcaaaatcaagttcattcatcaatgaaaaagcctatcaagtttattacgtagcaacaaccagacctagtttcaaagtttccacaccaacaactaccaaataatatatgagtttaatttctatatactatcaatgtaacaaaaaaaattacactgtaaatcaaacataaattattgttaatatgacttttaagttaattgttataaaaagtcaataaatttactatacatggttggtttctctgtgattaaattcataattgggtgacaatataaaatccataaaaaaaaaaccttttatattgttagttcatacactatctactctaataataatagcttcaacctatgttgaatggatatggatacaagtattggatacgaaacaaaagtttaatattgataatctacactgccagccaaccaaatagaaaattagaaaccatcctaaatatggatgagtagttattacaaaattcaataatcttatcatataaatgacaattcatgatcggaatgacactgtacaaaacttttacagcatcagtgtattctaattaaattatatacttataaactattcatattctatttatttttacatgaattctttaatttcttcaatatagcaaatgcttatattagtttgccatcatcgttatcatcgaactatcacttccactcgtctttgatgtcttgaaaaaattaagcacaatagtaacaaaattgaatacaaatgttatatttaggttatctcaagagattttaacataaagccgtcaagacatgcatatcggtatttgaaacatccatgcatcacgagcttgaacagtacattttttacttaacaattctcaattggaatactaaagctatttcacaattttccttctttatttgttgcaaaattgaataaaacagaaatattaattgaattgtgagaaattataataactaaccagtaactagaattttggagaaccgcactcacctccatatgactccttctttggggcgttgttgggccgctgctcggcgtcggtgtcggaccagcccgagaagccgtcgagtttgggcccgggcccgggcccgccgtcttgcgcggcgcgtagagggcgaactcggttgagcttgaagttgcgcattcgcagttgcggggtgtgtgggaatttaggggcggctaaggccaatcggagctgtagcgaggtgggggagcacgtgagggaagccatttttcgttgcagagagagagagaaatgaaggggataaatggaggagggtataacgagggtgttgaaacagaataacaacgttggattggatgttgtcactttttgattctcatccttttgctctgctttgtgttgtgtcttttactagtaaattagtaatgaatgtgatggaaaatttcatttctttgattaattaatttgttgagtttttttttttacgtatatcacatgtgttttttattggatataatataattataaaatgaatttattatgaataagaaaatatttcttctaaattaaactgaaataattcatgttagttaatgcgtgtaccttttagtattgattttcaagtttggaaagtaataataatggctttgaaaaagtaagtgtatttttttaatgaggggttcgttgttaataataaatggctttgaaaaagttaatggttttttaaggaggggtttgttgtttcgagtggccaatgtatctggcccactgaaagtatggcgagacaacggggaaaaataataaaataggtgaaatttcttaaaagaaaaggctctatgataaaatcataacggtggaaaaaatatgtatattttattttatatcttttgcaaaatgctatttaaaattaaagtggggtaaaattgttgtaatttatttttttatttaatacagttaaatttaaactaaaaaaattattaattaagggactactattgatccttctatttttacttttgatcctaccaatctgtgaaaacttcattttatcccatttcaaaaattcaacttcatcctattaaattgtgatttgattgtacattatacaatagaattgtaattttgctgtgttttacgggtgcgaagatgaatgcattatagaatggtaattccattatgcattctattcaacaaaatcataatttcatatgaaggataattttggaataaaaaaaggattagattcctatgaaagggccaatggctaatgaaataaggtcaatagtcgtctccattaattattaggcatttaaatcttacactcccttatttgaatctcaaacctaccattgcattccaaaatacaatgaaagtgtatgattcaaataaggggtgcaagaaataaatgcataattattactccctctagtcctatatattggtcatattctagaatgaatactttgtcttatttataagtcgccaactaatatattaataatgattttcaaattctatcatttatatcatttaaattatcacatgcaagcttaactatatttctgcactcccatatgtgtatcctatacccccatttttgtttgaaaatatcaaactatcgttttccaacactaacaccttcctcttggtatgaactactctcgggacgacatctccttcacctatgacgacaacttcttctcctacgacttcaccttcttcatgacatcctcacaagtcacgacgccacaaaacgtcctcccccctcctctttcctttacatgtcgtcattgaaggtaaaaatgcgatctagaacatggtatttcatctcctaaaacgaaaaattctataatgttttctttaaaacaatttcaaccattattctagagtcacgattctagaggctatatagtagccttagagaataatcattctataacataaaattgttttataataggctttccaaaatacctaaaatgtttttttttattttcaaccattaatttttattattatgaaacatatattttggaaactatttttttactgttgttgaacacttattctagaaggcaaaagctattttttttactgaacacctatttcgtaaactattttttattattatggaacatctattttgaaaaggtagaaacttttgtactgttatagaatacctattttgaaaattattttttattgttatataatacctaatatgaaaagttattttttaatgttatgaaacacctattttacgagataaaactattttttattgttgtgaaatacctattatgaaaactatttttctactattgtggagcatctattttaaaaaaatataatatgaaaaagatagtttgaaattcttaaaagtttggaaggtacaaaatttgatataaaagattttggatttaaatttccatgcatgactactggacccataccaatttgtgaaaactttattttattccatttcaaaaattcaacttcatcctataaaattgtgattcaattgtacactatacaacataattgtgattttgttgtgttgcacgggtgcaaagattaatgcactaatcgtgattccatttcgcattctattaagcaaaatcataatttcatatgaagggtaattttggaataaaaaaggataagctccctatgaaagggccaatggctaatgaaatgaggccaatagcaatctccattaattactatgcaattaaatcttacctcctttatttgaatcttaaacctcccattgcattccaaaatacaatgaaagtgtatgattgaaataaggggtgcaagaaataaatgcctaattattagtattaaattatcacatgcaagcttaactacattgttgcactcccatatgtgtatcatgcaacccccatttcggtttgaaaatatcaaaccatcgttttccaacactaacaccttcctctttgtgtgaactactctcgcgatgacatctcctttacttgtgacgacaactttttctcctatgactccatcttcttctcgacatcctcacgagtcacgatgccacaaaatgtcctcccccttcctccttcctttacatatagtcattgaaggtaaaaatacgattttgaatatggtatttcgtctcctgaaacgaaaaattccataatgttttctttaaaaaaaattcaaccattattgtggagacacgattctagaagctatatagtagccttatagaataatcattgtagaacataggttgttctagaataggctttccaaaatacgtaaaatgttttttattttttattctcaaccattattttttattgttacgaaacacctattatataaacttttttttcttctgttgtggaacacttattctagaaggcgaaagttatttttgtactggtatggaacacctatttcataaataattttttattgatatgaaacacctatttcgaaacggtgggagcttttttactgttgtagcatacctattttggaagttattttttattgttatgtaacaactaatttgaaaagttgttttttaatgttatgaaacacctattatataagctattttttttttttacagttgtgaaacacttattctggaaggcgaaaattatttttttactgttatgaaacacctattttgaaaaggtgtaagctattttttattgttatagaatacctattccgaaagttattttttatttttatgtaacatctaatatgaaatttttttaatgttatgaaaaatctattatataagttattttttaatgttatgaaacacttattctaaaaagataaaaactatttttttactgctgtcaaacaaagttaataatttacccttatttttatgttagaaaaccatttttattttcttttcctcttgttccctctaaaactccattgttactaggcaggagtgtgcgtggggaagaacaatttcgaggcagcaaaatgggaacatcggtgcaggtaacgccactgtgtggagtgtacaatgagaaccctctctcgtatttggtttccattgatggcttcaacttcctcgtcgactgtggctggaacgaccacttcgacccttccctccttcaacccctcgccaggtctctgtctctgtctgtctctctctctctctctctctcgcattttaggacctaccctttttaggtagcaaaaataaaaatttgaatttttgtatgtgggtatcttcgtttcaaacccctcctcgtttgaggcattggaactagaaagaagaagatttttttgtggggtggggttataattgtgaataacaatggaattgaggttctaggcatgtttctggtgaacttttttatgtgcgtatctttgtttcaccccgcccttcttcattgcttcataacaaaatgtgattttcagcacgggtattgatttctatgaggtcttttcctaaactccctgtttgttgttgaggcagtagaactagaaagaagaagaaaattataaatttgtttttgtggggtggagttataaacttataattgtgaatttcaatgaagcttgtgttttagcctgttaggaatgttttgttttgttacctttgatttcatattgaggttgtgtggctggcatgtagggtagcatcaaccatagatgctgttttgctttcacatgcggatacacttcatcttggtgcccttccatatgccatgaagcagcttggactctctgccccggtttattcaacggagcctgtctacagattgggccttctcactatgtatgaccagtacctctcaagaaaggtgaaattccatgctggtttatttggttttgttgttaggaggaataaatttttgtgattattggtttataggatgttggatatcccatatccttatctgtgtgcttgccttttatttggctagatagaatttgaaaaaaaagggtgttatataactggatggttaggttgaggtatcttgttcttttgtagcaagtgtcggagttcgatctgttcacgctggatgatattgattcttctttccagagtgtaacgaggctaacatattctcagaatcatcatttctcaggtaggcctttgaacaattgttgtaatgtgatgcattgaagtggtggtacgcattttgtttaactccactctgtcacctccgtattctctcttctttcgtcccaccgttctctttttatataatataggctagtttctgaaccataatcccattcaaacctttatttgttgaaatgaaattaaaggccattaggaaatccaaagttccctgcaaactgaaaccctttaactgggcagcagctcactttgaagttaggggtatttctcataagggagccaaaaatgatcaatgatgaagctgttgttagcgtaatcttttatgtttacctccgtattctcttatcgcctttcatggttatttggtaaatagaaagggccctgaataataacaacttcacatattatcagtgtctagtgtctagaatattttgcatgagcaatagaagatttttgttaacgactagaaaaaaatgatttgaaattttagttgatttttgaatgcacctcaatttcaaatattttggagctttgaattgaaataaattttgaatccactaattgatagtatgctgtttaaaattttattttcagaaaatgaatacacatttttgtagtaaaagtttactgatttacactatgtgaagtatttatccatattgcagaagttagaatatacggtaattgatgttacaaaattaaagtatgcattatcaattcataaaattaaagttttgatgtgagacaaaaaattgacaacacttgtatgaaatagggcatcgtcaccccaacctcccatgtaatcttctcaaccaatgttgtttaattttttagagtacctatctgattctgatatgccttcatgtttcactacttaatatcccctcattttggttgtgttattttaattggaattttaatttttaaccacttttaggcaagggagaaggaatcgtgattgcacctcatgttgctggacatcttttgggaggtactatttggaaaattacaaaggatggcgaggatgtcatatatgctgttgattttaatcataggaaagaaaggtaaattgcccatggctaaatttatcttatatatctttagagaccaaaaaggaaactacttatcaatctaatttttattaggcatttgaatggaactgttctaggttcttttgtgcgtccagctgttctaataactgatgcttacaatgctttgaacaatcagccttacagacgtcaaaatgacaaagaatttggaggtaaccatctttttaatcttgtaattgcagcaccgtcacataactaagatgggttttctcagtttttgcttcttaatagctgttaagagaaaactgaaatattttatgcttagtacattcactgatgaggcaagcatatactttaatcttaatcaagaaatgaaaaataaactgtttaggatttatgtgctttggctattctgatcatatattttgttgattatttagatatcttaaagaagactctaagggaaggtggcaatgtattattacctgttgacactgttggacgagtgttggaacttattctgatgttggaatcggtcagtacaagaaatatgtttatattctcgttctcccttttttccgtacagtatatgcgtgagttaatatcagatcttgttttttgcagtattggactgatgaaaacttgaactatcctatatactttcttacatatgttgcatccagcacaattgattatgtgaagagtttccttgagtggatgagtgataccatagcaaagtctttcgaaaaaactcgtgaaaatatatttcttttgaagtaagtggtctcatccttaacttacagttggagtaagatattcatatgccaattgtttatttatatgttgttttggttctcaggaatgctattaacacctacttactgttggcatgttaaacctatgattactttaggtttcttgagatatctatagtaaaggttttgttcaataatgagtaaaaattgaaaaatgagctttcaaagcctatcgtttgtcacggtttaagttagcaaacaaatcaataatatcttgttatgattatgattgctaatgttatcttgtgtctaaaactcgactgcaatgcttttacctgtaggtatgtcacccttcttattaacaagactgagcttgacaatgctccagatggtccaaaggttgaataatttgtatgcttatttttcatcagactaacttccttactgattctgacacatgtacctttcataggttgttctagcatctatggcaagtttggaagcaggcttttctcatgagatatttgttgagtgggccaatgatgtaaaaaatctcgtcctttttactgaaagaggccaggtatattctttagaaaaatttctttttcctttctgtctttcagtattcatgtgaatcagtataaattatagcacacttctctacgttaatctgctaagttattaatgtcttcttttttagtgttgatgccacagttgcatttgcatttcgagtttcaatatgaacattgttttagcttttcctgaggcaccaaagattaaatgagtgagggaatggatgtgcttatgtttgcagttgctagttactgtattcttcaataaaatattcacctttgcatttattgatgacctactttgatactggtccttgtgaatataacgtaatgttgtttataagttgtttctaaagtaatgtggcatgggcattgatttttctgttgtgaaaatagcacagcaaattcaaacttttggaatggagcttcttctgttggttattggatagtgctcgagttttttttttggttagcaaagataaatatatatattagacaagaatctaagtaccagaggtaccgtgattacaaggatagtgctcgagtttaattcttagtcttacctacttgtaaattgtaatataccttggcttgttctctctcgtctttgctaatataacatttgtgactattggagtattgtaaaggacctgcagttattctactgtatgtctatgcttcctctccaccactccattttggtgatgagtatgtggacatatcaacctatgatttatgccaagtttagctagaaaaggggcaataggtctgaactctcctccccaatcagtttgaagactcttaattttggcattaaactgaagttctaccatagctttgaactgttgaaaaatactaaaagtttcagatttgctcttttaagagataaatccaagtgtatttagagaaagcatcaacaaatgttatgtaatacaagtagccattggtagaaataacatgagagggaccccaaaggtcaccaaaaatcaactctaaaggagcagaatagacagtattggacagagaaggaagtctatgagacttatctacacagcaagatgcacagaaatccacagcattttgattgaaaagaggtatattacattgctgtagtacaagtttcattacatagaaatttggatggccaagtctagcatgccataggttgctggacttgggttccatagatgcaacagaaatagaacaattaggaaaaacagaattagaattgctagaattagaaacaaaacatgaagctgaagacttgactgggaagctttgaagctttaaagtgggaaaggagtagagtccatcaggtccaatagagccttgaagcaggatctcattggaaacctgagatttaacaacacaaaaatgtgagtgaaactcgaagtaaacttgattatttcttgcaaatttacttacacttgtgagattcttagtaatagagggcacatgtaaaagctgatcaagagatagagaaacattaattagaattatgaggagaaatgagataagaagaaccaatagactgaaagttcaaacattgaccatttccaatgaaaatttagtctggactcaagaccatcaaaaggggctagttgctggatattttgagattctcctgtaacatgaaaagatgttccagagtcaggaatccaattagaattgttggaccgagaatccgtgtttgtcaacatagcactaggttgatgagaattggaggctttatagctgttaggatttacccaaacatttgagggatgaggactggtagtgttctgtttggaactaacattcaaaccagaataattctgagatgatgactaataactctgagttgattggtttggaggtggggtaaaaggatcataagtgtcagattagggtttggttaatatttttgattatatcgatagtggcaatgagaaacagtatgtccatacttgaagcaaacctgacactgaaagtttgcaaagtgaccgctaccgccacgagcaccaccgtgccggccaccgcgactgtggtcacctccacgaccaaaaccacctcgcaatgcaaaattttctgattctggttgctgaaacttgttttgagcagggtatgaatcagctccatacgcatgagttaaattgacagatggtggatcaaaccattcatcaaacttgtgaagttgagcttcgtgagctaagagaagtgcctcaacttctgcaataggaagcagtttgaatttgctttcaattacaaagatgactgaactgaacctcaaggaagaccttcgagcaaagcatccatgtgttcttgaggagaaatcgggattccaactgatgctaatgcatttgcgatctcttgaaccttgagaagaaaggcatgcatcgatctatcctttagtgaaacagatcgcaactcagtatgtagttgccgtgcttgagctcgtgtttgtttggtgaaatatttatgaatgttgtcccattcttgatacgagtggactcttcccaaacaacgcgacaggattgacttcgagagcatcgattgtagccatgtgagaaggatttgacctgttgctcccacggctcatctgtcggattctcatgtctgacttcatcgatcaacatcagaggggaaccttggcggaatcatcagattcactacgaaacgttgaagctggtgtgatttcatcactggttcaatttgctgtcgccacagcaaaaaatttgaatcatcaagtttttccccaatcgaattagggaatgcagaagaggagggaaaaggattatgtgaatctgccattgttggatcgaactttgataccataatagaaaagatagaagggaaaagaaaggggagaagaattagtttcattaacccaatgaatcaatggttacaatcctgtatttatagactagttagttaaaacagccaactaactttaactgactgactaactcttaaccaacactaaactaaccaagctaacctaactcaggtcataaactacccaggactgcagtagaataactgcaggtcctttacaataatccaatagtaaccaaaacatccctttctttgtacccgtttggatatatcttttcattatagcatttaatgctgctaattttcaatcgtttgtcttttgttattgttgtgttttttaaattctagcttagactgttgtatcttctctcctattagccttacagaatattgtttcaaatttattttcataaaaatatgctctatgtttgtgctaataatgcttgatttcttttttgagcaatgagaatggacaaaagatcattggtcatgtaatatttttatctatggcgtattttctttaactgcttaaatttgatgtttgctatcatttgtttcaactgatcctcatgtgtttggatacgtagtttgccacactagctcgtatgcttcaagctgatccacctccaaaagctgtcaaagtcgttgtgtccaagcgtgttgctttggttggtgaagagctaatagcctatgaagaagagcaaaatcgaataaaaaaagaagctttaaaagctagtcttatgaaggaggaagaatttaaaacatctcatggggctgataataatactagtgattcaatggtcattgattctggcaataatcatgtaccacctgaaggtatgagttgtataaatttagtactgttttgttaaatataattaggtaatcagaattatccatttcagattcgtgttataaataccttttctccataactttctcattttgagttgtgtcatgtatatttgaaaatttctaaaattatagaaatggacattttgtcttcaactggttttgtgtcttgagaagtactggacattttgagttttaaaataaaagactaccatttcaaccacatcaaacaacattgaactgtctttggaacatcattcatctttttatgaactttctaatgtgacattactatttaatataaatcatgtcctatttaccttaaaacatgatgtttttttttttcaagatatgcatattcacagacaaaaccatacccttatctgagttttaaaataaaaggctaccatttcaaccacatcaaacaacattggattgtctttggaacattattcatcttttgatgaactttctaatatgacattactatttaatttgtatttaatataaatcatgtcatatttaccttaaataaacagatcaggagtatgggtttgtctgtggatatgcatatcttagaatcttttttccatgttttattagtttttacaattttgataaagttccttcactaattcgacttgcacttgcagtgtctggtcccagaggcggaggataccgggacatatttattgatggatttgttccccctttgacaagtgttgctccaatgtttccctgttatgagaatacatcagagtgggatgattttggagaggtcataaatccagatgattatgtaattaaggatgaagacatggaccagacagcaatgcatgtaagtttctttttctccaacctatcactaggtttctgtacttagtttggtagtttgggggatggtttttgtagcacgggttaggtagcagggtgctgtggtgctagctttgttcctaccaataaccataggaaccagctggcccctaaaatactgtaactttagtaccactggtactcattattaatatatattatctatgtttgctgagcaaaaaaaaaaatacctttcttttttcaaaaaatctaccttagtgtttatatcaggtttgcattctgaattagaacttataagtttcaatggatgcaatataacgaatttacttattcgaaagtatgttcatacttgccaaacataaagtcaattatattaatggatcacaaaacagaaagaaactttataaaggaaaagctatgatacaagaatattaagcttagtaacttgtggtttattttacatttggcttggttacttctatgtttttaactcttctttcattaacatttggatggcatgtaacagatcctgcttctaagtgaaatattttcttacatgtcatttaagagttctgatttagaggaatggagaattttgctggcatctatacttcaactctatgttattaataataatccttgattatcatttttcctattttctatcagggaggtgatataaatggaaaactagatgaaggtgctgcaagtttgatactcgatacaaagccatcaaaagttgtatctgacgaaaggactgtaagtagcagtatttatttattatattttaatgtttctgcttcttctgaatagtaaatttatataattgtgtttcagaaattgattagaggaaccaaggttaatttttttatttgttaccttttccatttttgcacgttgaatgccattaaatttcatgattttaccaaagattttaaatctatcttttcttgaaattttacaaaagatgatattatgtctgtttttgctgcagtcatagtaatcctgctactgaattgttcctcaaacctattatttattccttagatacttgtatgtgtctttgttctaagtttgtctcacaggcatcttatgttttttttcctataataaatcaagcaaaatatagatgtaattggttagagttggtaccactttcttgtatgcattttgaattttatcatgctcttcagctcttgtgattcacccctcttaatttggctgtgaaacgcatcagatagggagcattattgtggatgtggaatcttcttttaattactgatgtacagatgcatttcttgtgtttctaaatatctagtgttcatcagtctacttgtataaatcttaaatctgctgaatttacatatcatggtgtaaggtgttgacattatttttgtccaggtgcaagtcaggtgctcattggtttacatggattttgaaggacgttcagatggaagatccattaaaaatattctatctcatgtggctcccttgaagctggtatggatctcattggtgcttttcagttaattgaagcacatcattaaatcttctgttaattatatttggatgttcatcatttttcaaatggaacagcttcaattaggtagttcatcttgccaccttttaataccatggtatcttaacaaagcaatactttgaccagggctacaattgagttgtggcaaggaatttggatattagctggttaatgttatgttggataggtaaaggagctggaaaatatatatgtaaattgtgggcttacttgatgggtttttgtgggtgggaaagctgaataaactcaaggctgttgtaatgtttggaagggtaggtatcaaaggcaatttcatggtttgaggttgaaccgttttgagacaagtgtgaagaacaatcaaataagagtttatttccaacgtagcccaggttacattgattgccttctaaaaaccttgaatttgagtctccctttttggccataggtgagtcgtccaactccctttgttacacttaaccttcagaacttcaatccatagccttcccccccttagatgaaatttgccgttaatattattagtataaatgttaaaacttaaaaccacttcttaaatgtctttgcttgttggtggtgtcatttcatacttgcctgtttctttctcttgtgtataaaaacatgggtgaaacagagaaaacagagtatattaggggttcagatggctgtgttcaacttcaatcatactatggctgtgtactgtagattaaacagaagaggcttctccttaaggcatgattgtgtattatcatcccttgatcatgggaaactcatggctgtgtgagaaaatcacgtagctgcttgaggttagccacatggccatctgaatgccacagaagcaaacctcacagactgctgcacgattttctgtggaagcattataactattatggttgcatttttctaatacaacaacaacaacaacaacgccttatcccactaggtggggtcggctacatggatcaacttccgccataatgttctatcaagtaccatacttctatccaaaccattaatttcgagatccttttttataacctctcttatagtctttttgggtcttcctctgcctcgaattgtttgtcttctctccatctggtctactctcctcactacagagtctaccggtcttctctctacatgcccaaaccacctaagtctattttccaccatcttctctacaataggcgctactccaaccctctctctaatagcttcgtttctaattttatcctgtcgagtcttaccacacatccaccgcaacatcctcatctccgctacaccgactttattctcatgttggctcttgaccgcccaacattctgttccgtacaaaatcgccggtcttaccgcagtccgataaaactttctctttagcttgatcggtacctttgcatcacataacacccccgatgcttttctccatttcatccatcctgcttgaatgcgatgattcacatccccttcaatttccccatcatcctgtattacagacccaagatatttaaaccgtgtgacttgagggataatatggtctcctattttcacctctgagttagaaaccctccttcttttgttgaacttacattccatatactccgatttgcttctgcttaggcgaaagccatgtgtttctagagctcgtctccaagtttccaacctctcattcaattcctccctcgactctccaaggaggactatgtcatctgcaaaaagcatgcatctcggcgctatcttttggatttgttccgtgaggacatccaaaattaaggtaaaaaggtaggggctaagggttgacccttgatgtaaaccaattgtgatgggaaaatcgtctgactctccaccctgtgtcctaacactagtcgataccctatcatacatatcttggatagctcgaatatatgcaaccctaacccctttcttctctagagctttccacaaaatctctctaggcactctatcatacgctttctccaagtcaataaaaatcaagtgcaagtcttgttgggccatgcgatattgctccatcacccgccgtaataaataaatcgcttccatggtcgaccttcccggcatgaaaccaaattgattctcagtaacttgagtctcctttcttaatctccgttcgatcactctttcccataatttcatggtatgactcatgagcttgattcccctataatttgcacaattttgtatatcccccttgttcttatagattggcactaacgtgcttctcctccattcctccggcatgcgttttgacctcataatttcgttaaagagttcggtgagccactcaagacctctatctccaagagttttccacacttcaataggtatgttgtctggccccaccgccttaccattactcattcttttcaacgcttcctttacttcctgtttttgaatccgacgatagtacttatagttccggtcctcttctcttgtgtctagactgctagagtcatatccatatccatcattaaataagttgtggaaatacgccttccacctttccttgatatctttttcatgcactaagactttgccttcttcatccttaacacactttacttgatccaaatctctagtcttcctctctctacccttagcaagcctatatatagatctttctccgtccctggttcctagagcttggtatagtccgtcaaaagcttgggctcttgcctcactcaccgccttcttggtttcatttctagctatcttatacttatcccaagtttcagaatttctacacctagaccactccttgaaacactccttttttactctaactttgctctgaacattttcattccaccaccacgattctttacccctaggtccaaaacctctagattcacccaacgtctctttagccactttaataatctcttgggacatcttgttccacatatcatttgcacttccttgtgattgtccacaccaaccctcccatatcttttgttggaagattccttgtttctcacccttcaagtgccaccatttgatccttggtgctaccagaggacttcttctctttgccctatctctaattcttacatccataaccaaaactctatgttgggtagtcaagctctctcccgggataactttacagttcaagcaatacttcctatcagacttcctgataaggaagaaatctatctgagaacatgtccctccacttttgtaagtgataagatgttcctctcttttcttaaaccatgtattggctatagaaagatccaaagcctccgaaaactccaagatggatttaccctccccattcatctcccctaggccaaaacccccatgcaccccctcaaaacctctagccacgctacctacatgtccattgagatcccctcctaggaaaactttctctccttggggtatatcctgaagtaccccttctagatcctcccaaaattttaccttaaagtgttctgctaacccaacctgaggtgcgtacccactaataacattaaaggtgtcctgtcccactaccaattttaagactatgatacgatctcctactcttcttacatccacgacatccttcttccactccttgtccacaataatccctaccccatttcttgatctgatttttcccgtataccacagcttaaatcccgagttgtctaattctttcgctttttcacctgtccacttagtttcttgtaggcacataaaattgatcttcctcctcaccataacatccactatttccatagattttccagtaagtgtgcctatattccatgtaccaaagcgaatcctcctgtcatgaactagcttctttacccacacccgttcacgaaaatgtgggaacccttgcttacttttcactacatccgggcggcgatgcagcggctcttgctcttttgacactgtactcgagccatacagcgcgttgcttccgggcaacgacctagcattcacattattacgtaattgatccatgtcatagagattcgacaaagtttaacgttggctgtcgaaagcctaacacaaccctctccttttatccggacttgggaccggctaagaatagcaaagctaccctaggcaggattttgcatttttctaatggcttcacagtatttagtgttgtaacttttatgggccagctgactctgataaatgaatacataatgatttttccgaaaggttttggtgcatggatcagctgaagctacagagcatctgaagcagcactgcctgaagcatgtttgtccacatgtttatgctccccaattggaagagacaattgatgtcacctctgatttatgtgcttacaaggtacaatgttgtcaaatttcatacatttctgaaaaggctttgcaagatgtcaaaattaatcatgttatgcttttctgagtataggttctactgtccgagaagctcatgagtaatgtactcttcaaaaaggtgaaaaatagatgtctgaacgaactgttcattctatatacttgcatgttatttatcatgttgaatagcaacaaccaaacttatcccactagggtggggaattcataattttgaataatgaatataaattcaactgcagctaggagattatgaattagcttgggttgatgctgtagtagggaagacagaaaatgacccgctttcgctgctccctgtttctggagccgctcctccgcataaatctgttcttgttggtgatttgaaattggcggatatcaaacagtttctctccagcaagggtgttcaggtacttgttcagttatagtcaccattcttccttgctctgattgtctgttggtacatgaagtgatttccacttcatttccgaagtagacagctgatcattgtactccttaactgataatgttgaagctgatgaaaattgttgaaaatgctgttttccatgtgttctttaaccaaaacttgagtgaaaaaattagtggaatgctgaatttctactttatgagaatatgtatcataacataattaactttataggtggaatttgctggtggggctttgcgttgtggtgaatatgtaactctacggaaagttggggatgcaagtcagaaggtgagtgcttcttctgaacatttgttaattttgcacttgaaattgtttttttaatctagacaagactgattgtccaggttttggatcaacattctgatctattaagatgatttctttttctaatagggtggtggttctggtgctcaacaaatagttattgagggtcctctgtgtgaagattactataaaattcgtgactatctgtattcgcagttttatttgctttagatttggttggacagtgcaatggctaaacatgaacttctttccttctctgcactgttttgtgtgacacatcacactctggacctggttttcttataaggtagagaatgcaaaattgccttggtaaatacatgcttataaggattcaagactaaatagttccgagtagcagtgctgggacagttgcaaaatgggttaatttgggttgccatttgaacaagattcacaggggctctcacttcgatgttttcaatgaagaatcgtgttgcatcatttttgtggagtctttgtgcctctaatttatatcaaccaccatagcttttggtggatgtgaacttgaagtgtgtttaatctttgtagaattatagaaaaggaaatgtaatttgttcttgtgtaggcttcagattttgaaagggtattcatgtgtgtctgttgtcatctatctccacatgcagtttccacactaaaggtgaaattagactgacataaaatgaatctctgtagggattatcctttttaatttggctaatataattgaacagaacaatctagtttaatcaaaactgttatattatttttaatgtctctacttttgttctgaactttggtttatttgttcaacgccatgctgtgtgacaagaaaatatacttgtacaatgtctagtggcactgactgaatatttttgctcctttgaattagtttgtagaaatatattttgttggaccgagtcaaagtttccttagatacttgctcttcagccaaatgccatgacatctactctttcttcagccaaatgtctttaaatttagagtaaatagtttttactctaaatttaaagagcaaactatccgtaaattattatgtatgataattttatctaattagaattttgttatctaattagaaattatgtatgataattttgttaaattttttaatgattatcttgaaaggttatggagggcgagccctggtgcagcggtaaagttgtgccttggtgacttgttggttatgggttcgaatccggaaacagtctctttgcatatgcaagggtaaggctgcgtacaacatccctcccccataccttcgcatagcgaagagcctccgggcaatggggtacgaagttttttttttatcttgaaaggttatgaacttgtgatttattattggctaactgtaaattttttcatgcatacaatttacacttttttttttatatataaaaagaacggttgacttgctgatctccgattgatgttgaaaaaatttaacggttagaatcatgtcctcaatttgttaaaattgatgctaaattacacatcctggctgcaaaataactatacctgcaacgctatctctacatttttaaacgtcataaacaacacagtttaatgttggatgatagtaattgtaaaaacttggacttaaaatccaaaagtatgtttcttgcattttgcacatatatgaaactttttttctttttttgataaaaggtcattactttatcacaataaaaagctattacttataactacaagaatctaaataattgaatacaagccaaactatatacaacctttccaatctcttgagctctcacaagagcttccaagaatgggcagtatatcatgcaccacaagcctgattatgttgccgcctgatgatcttgagatgtccatgcactcctgcaggtctgcatcacaggctatcaaaacccattcatgatcatcatccagatacttgttatgaaatgttcccacctctagtttcaatcttttggcaatttcctctttcaattccacaataccacagtccatagagaccttaaacctgatgatatcttctttatatgttgccttaatggtcacactgttcacctcttttctaactgcaaaaggtgtcatagttttattaagggtatccatgtgttgcatttgaggcaaatcagaacattgaggattcatcttgtaagcttctggaacctgatcctccaaaacagcatctgctgaagggcatagatttctcaagtctttagaactaccagcaacctcaagtagctgtcctccaaatggttcttgaggttctgttgtttccacaatgtgaagcatagggtatgcagttgcacggtttggtgtactagttgagtgcagtgttgttgaccccagtgatcctcttaacacaagacattgctcactgttgcctgttacaaatgtatcttttggaggtgagatttcatttgggggactaccatggcatgaagcatgagtaggatttccactgccacttgagccactcccagttctaaacttgtttgtgcctttagtgccaatctcctgaatggacactcctttatcattaatcactttctcaggacttcgtgtccttgcttcaagtccaaggaattgatcttccatcgcaacctgtctttttgtttctgatgctccaaaagcatcaaaatcattttcgttgatcttaggttctgatggcctaatggtcaaggtggtttggcggtggaacttgtttgaagtgaaagggtcagaaaaggaaccagcagcaatgggaagtgaaccagtacttagagaattcaaaccaaatgctccttcagcaccatggaccgattcaataacacacttgagcttggacagggaatggttaaccttttttatctttcgagatggccaacgtgatatcccatgctgcctacagatgcgcttcattgtagtagggcaaactgtacagcaagaatatatccaagaatatcatgtatgagctgctactaataaaaacgaaagctactagtaatagataatgaccaattttgtgttttctgatgataaatatattctttataaccatatgtttctcaaaaagtagcaaacttaaatatgataagagcagcattgttggtagttatatattttatgaacactttattgtagtagagcaaactagcaccttggtagagataacaaaaaacatttcatttaactgtaaatcagagaatgaaacatagcataccaccaaggctctttgcagcatccttaaggcttcctgtgaagtaatgttgcaaaacattaagactaattgatatctcagcttttccacgttttctatctgagggtttctttttggttttgatctctaaggaagtgttctgatcaatgtgtccgcctgcattatcaccaagactccctccatcatttataccatcaaagtatgccattattttcggttctgatggctccagtggcagcccctcccccatatttggtgaggtatgtctaggtggtgacttagaagattgtgtaattggaatggactcaaatctcaaatgaactctttcatttcttgcgtctataatttcaattgaagcattcccctcaagttcaacaccagaagcaatcttaagactctgaaaatgtggcttcattgttgccaatatggatcccagcaatcttttttgttcattaaagtcagtgatcccaggaggcagaaaaaactctagtacataatcatcatttcctgtatgagagctttgtaagcatactgcaaaacagctgtttaaatgaaacatgagagcataatgtactaagggatattcggttttgcagaactgggtattgtttccacagaagcacatgttgtgggacaaaaatgccctcccagcaactccttgaccttgttgtaggtgatgctcagcacaggcctcatggaaaccccatttatgagcatctattacatagaatgctacctcagttatagacatgcaaacttgccccatgcaacaaccattaaaacttgagcaaattttcttaagaccgccaccatgtgccaagacactccgatgcttacatggaacccatgtttgtgccagaggcaaactatgagtttcacacacagctgtcagtatctccaaaatctcggctaatgcgtactgacggtattcattacaaatctggtttaaaagaattgccaagttatatctgtgacaatagaggggtacgatagaagtcacagaacaacatatatatcttatcttttgagaaaataaacaagatagggatgcatcatgcatgatagtagaaaacgacctgattgtatggatgctccaaaatttctgaactcctcaactttactgcctgcaaggaaactgacagccggtaactcaggaatgtaaaaaaaatgtttgcaatcagatacatttaacccgagtccaataatctcatggcagttacctttgtcaagatcaatctttaaggatatattaatattaatagtagtacatatgataataaataccttttaaccatcacaccgaactcaccaacatgagcaaagcatgcaacttataataaatagtacggtaaagaaatccaacctcaagggctttgcagattttatcaacctcaggagcatagttaatcttctgtgaagtcattatcagctccactacagccacacatgactgtcctgcaagctcaaacacaggcagggccaaggttccgcggacattgtaatgttgagcgtgatttaggcgctgatactctttactagaataaaactgaacattgggagtccattctggaattttatgctgaaaaactcggccgggaagtcccaggatctcatcattctctccatccacagagaacatatacatcagggaagctgttctatactgatggagtccattactatgtggatcaagaacaaatggttggcctgaagttgtaagtgcataccgatttccattcctcacaggtgcccaaacctgagcaagaacattctgttcagtcaactctttgaagtggcgaagcgcttgtgtcattctttccttgatcagacaataaccatctggattttctgaagctgtcatggctacaaggggtggcacagtttttttgttgtcatcattttcaattggattttcagttgttgtatttgtattacctgaaagcagtaacttcagtcagaacaactgcaggtcataaaaaaacataaagctcatgtttagcatcagatgtcattggaatagactatgaaaatttgcacagttatgtttcagctcaatatcatattatatctaacacttctaagtttataaacaactacaaatgccacaaatacatctgatgcaggcaacagtcaacatcccaagaaagtaggaattattcacaaaactatggcctctaaataagagatagcttgaaagaaaatgaaaggtaaaaagaaatgagtacacacaaatgaagccttatagtttaactatttaatttatacgatggagataaaaagaaaattcatctttaaaccaaggtggcagatacatgtcgcgaagttcatccacatttcatttgccttttaatcaatattcccaacaatatagaggttcaagaacagtaaggaaaataattataaaaaaagttaaaattccttcaatttgaataaactatataagctaagaaatagataaacaaactccaaatgaacactattgaataatctaaaccctgttaaatttcacaatcaacaacagtggctgctattcaagttacagtcaacttgaaatcaagcaagtcctaaaagttgaagaaaactccaaaatccaattcaacatgcaaactgaaacaaaccaagacatgcaataacaaaattggaaactgtggcaattaacaaagagatacctgaagctgcaatcctgatttgcctctcatcttcagcatcagaaaaagcccagacaggagaaaaaggttgttcagagatagtggaaaagagaaaaggaggcatggggttagagaccaaagatatatgatccaagggccacagactttccaggccaatgccaaaatccatgacaaacccatgttcctcctgtgcctttgacttgagaagaaggtcaggattttcttccttggattctgacatttttcacaaggatgcttttttcttggaaattggtttgtacagagtgattaagtttggaaccttgtaatgatgatgaagagagacttgagaactactatacaattgaaaatgatggttgagtaaaattgcagaaggtggagaatatcagaatatgtaacaaaataaaatttttactatggatattatgccacttgcttgttgagactaaagttgattgaatgttggataaataatgttataaaaggacaacaaaaattcattgttgggactaaatgccagttgccaaaaaataaaaagatggccactaggtacttctctttatctttgatattattttcaacacttttttactacttatgcacagggaatgagggaaaacatgctggggttaagaaaataaaaatggtgtattgtatcagatctagatatttatcaatgtgaggttagttgaaggttacatgtgccaaatttattgttattttttgtcatgttacaataagacaaattatgtgagaaaataacaaaacaaataattatgctacattactaaagaagatactgacataaaaaaagttaagataatcgtcctgtgttgctgagtaactgtgtaactagtaatttttttgtcttgtagttgtactattgtcgatgaaataaaatacttttctgtcaaaatctgcccctttttaattttgttttatgaaataataaaggaaagtgagattatgcatatccaaaatcaccatattctaattctactagtcctaaaaaagacttagtatttataaatgacatttcagaactaccaggccaaaatccaatcaaaatttaaaacatttgaatataagaagggctttgatcttgtcaaagccgaacttggacagcttttttcttttcttttttattttcagccatattgtttctcagctttttttttgccaaccatgcattatttatcatgcgggcatccaaggaagttggggatgcccacagtccgggaatttaataaatttcatgtgaatgcaaacattataaaatctatatagggtatctgaaatcaaattttatgcacccaaaaagaaattaaagtctaaattaaacaataaatagtaagagactttctttaggaatctcattctccaaggagtggacttcaccttgttgactgttggactaaagatatggaaattaatagttggactaagatatggatattaaggtggtgattgatgaatatcaaatgtaactatgtagataaaattgactggaatctttcttcaacaagaaaggaatcctggtccacaaatataaacagtgatacatcctccattgcttttctgtatggtggagtggataactaactgttcctctatcatttgacaggacatagctgagtgtatgtgattcatagattgttgcaagtcaaagattagattctggtttatgatcaatcatttattggttgacatataaaaagttatagctttttttttatcaccataattaggatctagctatagtgagatccctaagtatatatttttacaagcttatgagattaattattgattcagtatttaattatactttaaattccttatccctatcaaaaaagtattaagtattctgcaaaatcgaagataaatcttttccacagaattgttaactaattctcaagttacgtgttatgtcaaaattaaacataaaaaagatgcgtttctttttttggaaaaaaagaagaagatgttggaacctattttcccttattgttctcccttcagtttacttttaaaaagttaatcaaatattcacaaagaacgcactacatgactacaaagtttggatagtttgcatgagtcttacgttcaaatttcattgctattattttataaacacacacaaagaaagattactcccaaagttaactttaccaattcactaagacaaatttttatccttttttttattaaatcatatgttttcacaattttatgaacttatatttcaaatcaaattaatattttttaaattaactatccaattgaacaaattattgggagacaaactcaacaaaacgatgctgctagaggtgttgagagcaaaagcttccaccaccattgaaatgatgcatacaaggtccagtctatcatgttgaggctcctagcaatgatttgagtggtttttcataggggattttcacggtgaaggtgttggaaccaaatttgagaatgtaaaaaagtaacacatatagtgcaattaaaaattaccactattcataaacaaaaaagtcattgaaatttactattttaacatcatcaacttaattgaacggaaacaactaaattaatagatttaaaataatttggaaattaaattcaaccttataaaaatttatgaactaaatcaaacatttttaatattatccgaggatgaaattgataattaaggccacatgtaaacccaaaacgtagtgtcacatcagctcctcctcttgaaattaccaaaacaccctcccttgactcacctctacacaaggtaaccaaaacccgacacgcacgttcctctctttcatcactcccgagggtctcagaccacaacacagtgatcgcgcacacactttcaaagagcttccaccttccactggcatctcattaaaacgccaccgtattgctcacaagccaatgccttgctcttccctcacttccactggcgataacagcagcagcagcagcagcagcaacaagaagaaggatggttcttctctccgcgagttcaagctgaacgaatcaaccttcttagcttcgctcatgcctaagaaagagattggcgtcgatcgcttcttcgacgctcatcccgaatacgacggtcgcggcgctctcatcgctatcttcggtactcctgcaccgctgactctcaccttcaatttcctcttttttctttattttttagcttgtggaaatgttctcaagtgataaattggaaatgatctcgatttcaggattgtgttcgagttaatttgttgttttattaagatgtattttattataatatggtttcgagtgtggaattgatcgaaattaagacgtttttatctgtcttttcagattaattgtgtgtttcctttgcatgcgttgaatcagtggactgtgtggaggtttgttgtggagtttggagagtggaatcaatcaaaattaagatgcgttttgttgtctctttgtgttcggattagttgtgtgtttgctttgcacgtgcgaatttagtggagtgtgtggagatttattgtgaatttgatgaaaagaaattgaagaagtgctgaaattattggagttcggttgttggaatggaaagtgatttagtcatgttcatttgtgtggtttggattttgacgtgaacgaatgagagatggaattaagaagacagaacctgttatagtgaccttgttggattggcttcgctaatgaagtgttttttattgctttagaaagcttttttgtaaggagtgttggggattaagtttttgtgttgtgtctgactgtctgtattcaaatgtttgggatttattgttttttgaatttttagttttttttttgtttcaatttagtgatgaagatacgagtgtgctgtgttcattactagctgtttgcatttttaggcttctgtttttaatctgaatcactttttcttgtagaaagtgtgtttgtttgttgttctcactagaacgtagagtaatgattgtaagttgtaaccttccctcttttctttcattggctatgtgctaatttaatttgccgctactaaaatgtcttttaatgattatgttgcttgtgttcttaagtatgtttttcttatactgtgattgcatttgttaatggttcatatgaaaaatttgttaaatcattagatcggcatgtttgcagattctggtgtagaccccgctgcggatggattacagattacctcagatgggaaaccaaaagttctcgatgtcattgattggtaaatagattgaaaggactttattttggatatttagctgatatttctttctgagtgtgtactggtttcccaattaatatatggtacttttcctttcctcagcacagggagtggtgatattgatacctcaaaggtggtgaaggccgattctgatggtcgtatttgtggtgcatcaggttagtgcttggaatggtatagcttgttgatacaaataattatgttcagatgtttttcagtatattgtagtaattgcttgcaactcaggaggtatttgcaaaagaaaactacgtgcacagcttagtgaccttgtttagggatgaaactagacaattattacagtgagtagggcagtttgtaaacaaattggtactcctgatcacatatacattaaagaagtgatttttaatataccctaataaagtgacaaattaagaatacaatggcctggtttgttttgattttattttattgttgtaaaaatcatttctgtaaaatataattcgaaaacagttttgaagaacaaaaataataaaaatcttagataatttgttcccagagtagtttcaaaatcaacctgttcgttaaattacaacccttcggttgatgaggctgtgtttcaattttttattatttacagaataataaattaaaaaaatatatttgaactgtttttgttttctcggttttaaaactcctaccttgttgtattgttttgaaaaattaagataaggaaacactcttaaatgaggtttcagtgattctttattattaaaaaccaaaagctcttattgaaaacagaaaccaaacaggtaaaatttcctcctccaacaagtctgacaaagtatttgtttttctttttttttttttttctgttttctgtctattagagtaatttatagtaaatggaaattgaattattaagcttttgtctttgctttggtcttcctgaaaaatattgtacaggggcatcactggttatcaatacttcgtggaaaaatccttctggtgaatggcgtgttggttataaattagtttatgagctattcaccgaaggtgtgatatctcgtttgaaggtggtattacagttttgttgaaatattttagtttctctaggcttcatacctccggctatttgatctaatttctgttttctccttttgaaatgttcattggcagaaagaaagaaaaaaaaagtgggatgagaaaaaccaggaggaaattgctagggctgtaaaacaacttgctgactttgatcaggttcataggaaattttattgattcatgcatatgctagaatggtagaacagtaaattacatatgatatactcaacacttcaacattttgtttagtaggcatggcagtttgcaggggcaagctgttcacatgttctctttttgttattgcattttcctatcttgtgtgtagttgatacattgattagtactgtgtttgagacaagataaagaaacttatcctttcatatttcagcctgctttttctgctgtattttcctaacattctttctggaattactcatcagtagcgcattatgctattatgaacatatgagattttttttaaagattcaacatagcccatgaatatgttagtgtgtaatgtgctatttttccttctggatgctcatttactgatatgattgcctgttgatttttttaatttaattaccagatcaaattgcagataatactctttattttatgaatagctatcatgcttatatagatatgatgtggtttttttttttttttttttatttatcattcttgttccatataactcaaaccatgatacattttctagcaacaaatcaaggtagaggatgtaaaacttaaaatgttccgggaagatctccagaatagacttgatattttgagaaggcaatctgaggtgagtgctaactgctaagcataaaccatgtcatcttcctttattgctctttgcatatttgtgtattttcttgtccttgaaataggaaatgaataattgatttgaatttatatcattataggacactcataagtggtggaacaaggatattgatagaatgattgtctctgtatgaaataatgttgaaaaaatcttttccacctggccacacataaacaattaaattcttgttttttctccctctgactcgtctcaaagattcaaactaaaagagatatgtatacttgtgtttgcgctccctctgtgaattttgtcaactgaaattccttacttttaaaaggaaatgctgttttatgttttagagctatgatgataaagggcctgtcatagatgctgttgtctggcatgatggagaggtttggagggctgcccttgacacacagagtctggaagatgatccaaattgtgggaagcttgctaattttatgcctttaactaattataggtacatttagttcctggtgttaatatttattataactgttaatcttagttgatagcctgtgtctggagatgcattgtgaaattggaagatactcttgtttttctactgcaatgaaccttttgtttgattgtcactgcttacagccttagtttgaaaaccatgttctgttgagtatttgattcccaccttgttttccatagttatttctaccacaacaaaatgctactgtaaatgttgtatatatgaaaatatatgtcatatattttaaatataaagtaaaatgtgattgagttgaatgggattgaatcttcagtgtgttgttcttgtgtttttgaaaatttcttttgaaacaactcggcacttgatttttatgttatcatattgttcatttttttttgggtacaacaaaacagtttagttgacattctgcaaactgtacttctcaatatatttggtttctccactcagggtttgtgtttctttctggtttatgtatcacagaaaaaaaatcaaatatataactttttttcctggaaaaggagcaacttaatgattgagttaggaagagcttggttcgcacctttactatagttgatgtttctgaattaatttactttgccacgaagaaaataatttatgtggtttagctattgaagcaattgttgttacttttttttttcctttctattaaattgtattaaaatcgtgagtggtttcaatgctaactgtgactgcctgttctttcaggatagagaggaagtatggcatcttcagcaaattagatgcttgtacttttgttgttaatgtcttcagtgatgggaatgtcttaagtattgtaacagactgttctgcacatgccacccatgttgctggtatagctactgctttccacccaaaggtactgatatataattttatctatacagtgcaacattcttgcgaggaatagtataccttttgacatacaatattgttgttaggagcccttgttgaatggagttgcacctggcgcacaaataatatcttgtaaaattggggattctcgcttaggttcaatggaaacaggaacgggtttgattcgggcactcatagcagctgtggaggtgctgcaaatttttctcctttttcctcctctttagctgattattctggatattttgacaagtgaaatatgatttgcctttgatttttgtgtgtttgatcaactgagtttgttttaggatcttataacatcctgcataagtaggacttttaatgatgggcgtgcaatatttctttttcagcataagtgtgaccttatcaacatgagttatggcgaagcaacgttactgccagactatgggcgctttgttgatcttgtgaatgaggtattttcttagactttcattttagcggagcacttatatcatttatttgccattctctattcttagttgttattttggttggtttacttctaggtggtgaacaaacatcgcctgatatttgtgagcagtgctggtaatagcgggccaggattgagcactgttggtgcacctggtggtacatcttccagtatcataggtgttggcgcatatgtatctcctgctatggctgctggtgctcattgtgttgttgaacctccatctgatgggcttgaatacacttggtatattcacttccctcattggatgactttttatatccttgtgtcttaattttgttacttctttattctctctttttttgcatcattatcattgcatgatttatgcaaataattttgcaggtctagccggggaccaacagctgatggagaccttggtgtttgtgtgagtgctcctggtggtgctgttgctcctgtccccacatggactcttcaacggcgtatgctcatgaatgggacatcaatggcatcaccatcagcttgtggaggaactgcgttgctcataagtgcaatgaaggttcttgcatgtggttcttttgtagcttatctcatttagtggtatttacttgcacacatctctgatttttgtgatgtgttacgtctgtatgatctgcattcaggctgagggaatcactgtgagtccatacagtgtgaggaaggcgcttgaaaataccgcaattcccataggtgatttacctgaggataaattatccactggacaagggcttatgcaagttgacaagttaaataatcttcccagtttttactttcatgaaaattttagtaaatggtagttttgtgacatttattgacttaaatcatatactcgttgacagggcttttgaatatatacagaagtgccaaaatgttccatgtgtttggtatcaaataaaaatccagcaatgcggaaaaacaagtgagtttacattctaccatgtacattttaccttccccttatgtggacaaagacacgaaacatgttatcttttggctttcccttatatttgtaacagtagaaagtgtagaatgttattactatatgtgagattaaaattatgctcgagcctttacctaatggcttatgattttgggatagttggaagttggcacattaaatgatatcaaagcccaatttaacagttctaataagagtgtgggcaatgcaatagtccaccctaccttgtgctactaagggcttttgcatgaggggtgtgttagatataaaatcattcatgtgacttcacctaaaagatagttagttcatgaccatatatacaactaagttacttgggggaaataggtcggcagacatcttttatatatagtgaagattttgtctaataatatgaatttgtatgaaaaagcttttttcttgcctagaattgtctctcaacttccttgctcctgtctaaagttgatggtggagttacattggcatacaaaacatcacaacttatctgtgaaagaaaattctaatggtggcaaaaagaattgcagttagagattgagattttggtaaattgctggagtgaaaaagcactcagtgacatttatatttatactcatttcagaataaattacatttaatagcaataaataaaaatgcaactccctaagaataatggttagcactatacgcaaatgtgactattcatctatcctagacagcaattcccaatatatagaaattttttccaatgattaatatacaagttttaacatgtacataaaatgtttcatggctgaaaaatagagtagcattgatttctgaggaggtcaatattatttacatctttgaaatattgttgctttgcccatggataaataatctaattaattagatgacttggtgcacaaatgtttttatacattaaaattgaaattaggaaagtttatgtgcaacttgtctaggaggaaaagctagattgtagagtaatatctgatgcttttgtatgattgctaatgacaggtccttcatcaaggggcatctaccttagggaagctagtgcttgccaacaatctacggaggtgagatcattgataaatttgttgtgcattgttgatcacaatgattgagtcaggtcttttgaaacttgtagaatgaatttaagatgggaaaacctattaatgatgacttgtaatcttataaaaatgatgagaaattgaagagttaaatatgctacactagttaacatccttaaggaaagaacataaattagagtccgtagctattctgttagtaataaattggtgaggaattgtgggtctgtttgattcctgtctcacttttttgtttggaaaacaattttctaaaacaattctacaatatgttgcaatcaatttcttatttaaaatctattaagttttgaaagttgtctcgaaaactagtgttttaaaataaataaagaacagaaagaactgggagatgttttgtcattctctttttctattttcttcaaatgctttgttcaagtgctcagggtacaaatttttagaaaatataaatggtctctagggacaaacactttcgcatgtagtaaagggactaacattttagaaaatatttttgaaaacaataataatgacttattagtatttacagttgttaatgacacagtaattctaactcctaattcaacctacattaattaggaagtctaattatttacattgaattgcctgattcctgatatattcaagtgttcaacatataattaggaaacaatgataattagccttactcccatcaaatgccctcttgaagatatcagctacttgttaattttgttttccagttctaacatgcagtaggcaatggcataagtcttagctaaatctttttctcaatttgtattgctttggcatatttggttggtgcaaaaaatgctaaaatctttattggtgttggttgtcttgtggtcatttagaatgaagtaatttttctatgttcattgtggtattcttctcatggtcttttgggggttgatgtctggtctatggagagattgacatgctgttttggatgtttcttgttctcagttttccttttcccccttttattttggttttgattttgttagttcttagggatttcttattctcttgtgcttgtacttttctatcatgataaattcttcatttttttctaactcttcttgaataaagtggcaattgacttttatgtgtgctgttcttttttcacaatactctgggtttgaggcaatgtgaatggtaacttgattatcacaccaaagtttcatacatagttggcccatgaatccaatctcatcaagtaggtagttgtcaatctgtgatagtggtgcatagtggttgactccaaaaatattttagtggtataatgcatagctggaaggaagattatacaaaagtgaattgttttattgaatttcaagttaacagccatatgtcaattataaccaatcacccaattgatttgcttgacttgtcatggaataagttttgacccatatggcttctctggttgcttgtacttttcaaaattctaatcttttcatcagctacttctaaattttattgcggtcgggtcctttgtgattttagttagtaattcttttctaacttttggtcacacatattcacagtggacagtgcaagttaatccaaattttcatgaagatgctgacaacttcaaggatttggttccatttgaggagtgcattgaattacattctacagaagaaacagttgtcaaggcccctgactatctactgctcacttataatggtcgcaccttcaagttagtgtgctttacttcaccattattttcattgtttgcatatattgccataagtttacattgaatgtgttaccaaaatagtctttgcttttatctagttttttgtttgtttgtgataaactgaaattattatgctcctgatttttgttacttcaacatttttttttggacagcgaaagtagtttttattagataaaagtaccagaggtactaaagatacattataggtataaataggctactggatataaggagtcaggctgtgtaacagactgctcaatccagaattcccaacaacaagtacaacagcttgccccacaggtttttgtttcctaattacaaaaaccatctattatgttgctagaccactggttatagtgcatagaaaaatctttctccatagctctaatccacgtccagtgcaaaaacacagcatcctccagcaacttgttacttcaacattaatttgttagacatatagggatgtttctgttaatctaattgttatagttgtgccttttgctttgtgttaatattttaattttgtacagctgtaaaagcttgtgaaaccaggtttctgatttctgaataaaattgatagcaaacttttctgaacaagatgcaaacaccttttttcttctgagtttatctcttaatgttaataattagatgcatgacttctatgaggaattgaaatgattgtgtttgccttgcctgtgtaatgtcaatccttcctgcttgagtcaaaagtcaaaacacttccattgcatttgtaaaccttttcatggtacactgttacttatataataattttgaagtagacacattgcaatcttgcaagacctaaattgtgactgtcacctaaccaagatgaccacaggctcatccaagtcatgcgagcctcaaacttatcaataaataacacccaactatccagagagtgaaaacaagggctaacttaaaatacagtccaagtgaaatttcctagaatttcaacaagattcctagtaacattggttaaaatttataagaaactacaaaactatgagtggggactcattaaatatggagtgagatgtacacaattttgtgattcttgataatagtgtgttgctagcatttcccctttcaatgaagcttcattgatttttcaccttgtctaaaataatggtatactttaaattactagcttatcagacttctaaatattaacaaaacagaagtattgaaatttccccttcgagcattgtattgggctcaccaataaaacaatatcagaattgctggagtagaacactaagacaactctttgccatcattaacaaacatatatccacaatttgggtgagcttgtgactgagtagttatgagtttctaactgctgtaattgacacaggacaagtgatgtgtaagcgttattggcaaataactaattcttcaagtgaaacggtctaaaccaaaccaatagaaatcccattaaactataaaataaacagtctagcaaaagtagtttacaacaactccaacaagacaatatcatgattacaacttcatccttaaggaaaattcactagataggactaaaacagacttagcatacagctctttttttattggttattttgatcgagtttctgttaaataatgttaatttgtagttttattttattacttacacaacttgttttcttccacttgcagtgtagtggtggatccttccaatctttctgatggtcttcattattttgaggtctatggtattgactgcaaagctccatggcgtggtcctctgttcagaattccaatcaccataacaaagcccaaggccataactaaccagcctccacaaatttcattttcaaagatgttgttccagccaggtgtgcgctagttgattaaatttatcttcatacttctttttgctggtgtcctactaaggttttaaatctggtatctacatgtaacacatagcaaccaaaactttaagctattgccctgtagtcttattctttttgcctaatacacctagtattggatttgtcttaaattacttattccatattcacattgaattcacaattcttctgtatttatgtgtttgtagccctaaattcaatgcttactttgagacttatgatggagatgctccaacttatttagttaggctatctttatacagatctctttcatgtttgtaagtgctagtgtagcattggcccagtccatatactaatcctagcccaacaagtgaagtggatatacttaatgagtttaacactttcagttattttctttttgtttgttgcttcactaggccatatagaaaggagatacatagaagtgccgcatggtgcatcttgggctgaagtaacgatgaaaacatcaggttttgacacagcacggagattttatgtggatgctgttcaggtacgacttgatgcttgaaactttgtcagattgtgggcagtcttgttgacatgttttctatgcccagctgtgcccactgcgaagacctttgaaatgggagagttctgtaaattttccttctcctgctgccaaaagctttgcctttagggtagtaagcggccagacattggaactagtcatttctcagttttggtcaagcggcatagggagtcatgagaccgcgagtgtggattttgaggtacttgaattcttatttagatgaactttcccccctcccaaatatttggaaagattttgccttttctttttgttaaatgcatctcaattcctttatatcaccttgcttgtattgtgtgataattgttgataatttgctatttttatatctatataacagatcaggaacttaaatagcaaatgttaaaaggtgaaggctgtagataaatctcatgaggaataaacatatgatttttttcttccgcttggtccagtaattttgtagttgtcctttcatatattgctgcctctgaagctataattggatcattttctctgaattttttttggcttaatgtatgatctcttttatgatgtgggatatgttgtgttatttcattctacattgaatatacaatcctgccgtctacataaaatttcaggttgtgtttcacgggataaaggtcaatcaagaagaggttttacttgatggtagtgacgcaccagtcaggattgatgctgaaactctactggcatctgaggaacttgcacctgtggcaattctaaacaaggttatctttttaaagctcctattttcccctaatttggaaaccaatgagatttacctgttctcctaatgtatattaaacttgcagattagggtcccatatcgaccaatagattctaagattattgcacttacagcagatcgtgacaaacttccttctggaaaacagattctggcactgactctgacgtgagttataaattttattgtgtcatttgtctttcgataatttggatggccttttctcagtattctgattttgcagctacaagatcaaattggaagatggagctcaaataaaacctcacatacctttgctaaatgaccggatatatgacactaaatttgagtctcaattttatatgatttctgactcaaataaggtatattaatatttcatttccttctactaaaaatgaatcaaatagtttatgttagagattcgctttctcaatcctatgaataataagttgcatgtaagttgtgctcatatatataaatgctgagttttatatttgctgttttttttccaatttttcgcctgactgattgtaatgcactagtagtcacaaagtagtgggatttataacctgttgggtgagaatgcacgtgttaatcagtaatgggcatttgccagaagatatctgtttcttttgtgtattccaacatcttttctattttgttagctctttgtacatgttttttccaaggaaataatcccatatttttaaagctctggtaggaagcagggaaaaaaaataaaacgactatctctaaaattaacatgtacttcgtttgcttcatatattttatctcatgctttttctgttctgattatagcgcgtatattcaagtggagatgtctatccaagctcttctaatcttcccaaaggagaatatattttacagttatatttgaggtatatgtctctttctgagcataaaccctggatgagagtgcgcatacttgtttgttcccattgtagcttagtgttgttaaatagtggtcatggcgctgccttcacagaatggtgtggcagattttttgccaactgccatgggcaatttgtgaagggagtcccgccatggtggcgccataaggcgcaatgatgtgtttatatggggggattttggcattctgccatgttccaccaactgccattaataacactggcagctttctatagatctgatgacattacggtgactttgcaaattttgaatcatatttcaattcataggtagtggttgaatgctactagtgaactgatattgttaagaggacttggaagcttaatttagttatctttacttgtaataacaaagctagcatatcacaagtggaatatttctaggttcataaaatatttatacataaaagtgcattcattgtagtccctcattgatagaacaccaattgagcagaattattaaatcacacaaaatatatagaatacagcagtatttgttatcccacaatcatagactcttacagatattagtctctgtccaaagtacaaggagacaagacatcatattcccccttttacacacatttaataatatatgtctgcctaaaattgtcaacacgacagttatagttgaacatattctaatgataaataactgctattgacatttattattacagactttctgataataaattagctcctactctaccaaaaactgccaacatgatagttattattacacttatatctaataatacacaactgctcatgacagttgttattggttcccataatttgcattcatagtttatattttttttgtttcaggcatgacaatgtgcagattttggaaaagatgaggcatttggtgttattcattgagcgaaatttggaagagaaggtagtttatctcatcaattttatgtattcacaatggtcaattgctgctgaagtctagaagagcttttccactatgattgaaggtttttgaattagcattgattatgtgactcacgataaagatggggtcatgagtcaccataaatcttaacaaggggagagttttgaaaatatgattaaatggtattttactagtctactagtataatcacatggcagctacaaagatcagataatgctgttgggttagacatgcccaaattgaagaaccttttgcctggaattttcaaaaaccaaaagtatttgtagttctcccgaaaattgatcattatgtttgaaaataatttgtaattgagttatacatgcctccatctagcagtgcctctgctgtctagctataaaaattctgtacacactactaaaattagatgataagtattctttctatctatttattcattttcttatttatgtttttgtttgtttcgaggatgtcattcggctaagctttttctctcaacccgatggcccgctgatgggaaatggttcctttaagtcctcatcactagttccagggtatgtgagtatgtttgtagtcctaacatggtttaaatgtctccttgtgttgttgtgttgacttttacttattggtagtataaaagaaggaatatatctcggtccaccaccaaaagaaaagcttcccaaggtacattgctatccattgtcaacgtttcagatatttccactgacagtaatgacgacaattgtaaaatttctgcagaattctccacaaggatctgttttgctaggggcaatttcatatgggaagctgtcctttgttggtcagggagagaataaaagtcctgaaaagcaccctgcatcatatcagatttcttatatagttcccccaaataaggttactctctgcctcataaagttacctgccttcatttcttgttgtatgctttatgaaattaattgcacatcccatactcctaagtggctgttttgagctagctagcactgggctgtgctgtagttgaatcaactatcatataatatatgactgatgttaatgtctaattatgtatcttttgaaagattgatgaggacaagggaaaaggttcttccttatcttccaagaagaatgtttcagaacgtttaaaagaagaggtactatgctagttatacatcagtaaaagagcttccttttggtttttatcctatttcctgttttatttatggttcaatttatgctctttctgcatcttttttcttctcgaggcaattgtattattatccatgttcacattgttatacttcaaaaattgcgttatttgaaacattggtaaataactgtgaaggaggatgtctgaaacaaggttaattacgtagaggtgaagtttgttagtacaccttatagtgaatttattttatcattgaagttaattacctttcttggttcaaatcaatggcattttatggaacattttctatctgttgattctgtatttcaaaacttgtcttctagaatattcctttatcttcaatattaaattgtaaattggttattagccatattttttcttaataattataaaaatgacgagtctttgctgatacgagtgaatggtgtatatttgtttttggtaaagtgattcatgtgtgttttaatgcctttaacatttaaacagagcatgtatgtatattgtgtagtatacaagttaggaaacaaataattgtaaatatcttatgtactataattatgcctcaaatctgtcatcatgatgtagattccattctatggattttagaatgtttcccttatgtcttcctggttctttaattttacttgtccatcaggtaagagatgcaaaaataaaagttctagcaagcctaaaacaagaaactgatgaagagcgtttggagtggaaagagctatctgccttgcttaaagtcagtacagaaaatttactccgaatttgtcttttgccttcattttattttctattaccataataattgatttatattcttttgcaacatttttttttgatgtttttcataattgtaattggctgtatattttctgataaatgtattcagctgtctattctccatattattatttattaattaaataaacgtatgctatatttccttgcagtcagaatatccaaagtacactccattacttgcaacgattttggaaggtttagtttcttggagtaatatcaaagacaaaatccatcatgatgaagaggtacattttttggtggaagtaaatgtttttgatttttatacttttcacctcatctctgtgattttccatcatttaacccccccaatatatatcacacatacatgttcaaaaacttgaatgcgattaaggtttacttgtggagttttggtgtttcattattctttcggattctcaatttgtgtcatcaatttctattttttttttaccctgacagagtggtcacaattacaggttcctcactctataaaacaagataacaaaaagatagaaatattgcagatcttcctgggtctgcttcctccctgccctaataatacctcaatttgttactaaataactggctaaactttttctcactcccatggtcctgccctttttatcatttaccccagcagatatgcacgcctcagttccaaccttattcctacttgccacatatgcagattggtttcagcttgaatttccatctcaattctcagtcgcttaataatcccatccttgcttccttagttatcttagtaattgtttgagtcctaacagatttatatgaaaagtttatcctatagaagtttgtactagtttggtgtcgataaaactatgaatatcatgattgcaatttgcaggtggttggtgcagccggtgaggtgattaacagtattgacagagaagagctagcaaaattttttgctctaaaaaatgatccagaagatgaggaagcggaggtactcaatcttgtcttcaatactagtacttatttccattgcccattctgaaatggttactaaagaaacagaagatatgcaggaatcctgtatgttactatatgcatgtaatctattaatacagttggtacagtaaattagggaagcaactacagatattaatgaactaattgtagcttatcaactaatcacagcttatgtcttgaggacagttgtcctacagctacttaattagcatgttctaaaactaaatattaatgctaaatctaacagttacacttcggttgtatttgtgagatctgcaaaagtacccatggatacatctatcatacacttacccgtgttatctgtttaatcaagtatggatataaaccatagggatctatttgcacattatgaattatgtggacacacttggaatttctcaaatagtatagggaatttgttgaaaagtctcaaatagttacagtgctatagattaatttaaccttttaacagttgtttaagtgtaaacattgtaaaaaggattgtggtgtaaatatttttatacactgactgtatcaaatgttaacattgttcttggctaaatttattatagaagttaattctatctatatgttgataagttctgtactactttcacactgcattgtggtactcctgaataaatttcaagagatttctgtgaattactcaagtgcattcagcatgctgttatttgcatgagtgaaaaaataatatagcttatatttacaagaataaaaaagaattggactcttttctatcagtcttgtgttcccaatgcttcaaaaattcctatgtttccaaagctatatattgttatcatttctatcggtggttatttgtaatttgttggcatttaatgatccttcattctcactgtagaatatcaggaaaaagatggagttaacccgagaccaattggcagatgcactgtaccaaaaggggcttgcgctggcagagattgagtctttaaaggtttgagcttttattttaatttttttctgatcaggctctttaaagcaattattgtacattttcatcaattgtttataaagttaaatgattatgcactgacaatgtaaaacactgtcatttattcacaaaccattgtttatatgactttcaatataattattgtaaaagtcaacaaacttatcatgcatggtagtttgtgattggatggatgattgaataaaactattttacatcgttggtgtatgaccctttctctcttatttaaatacatgctaaacaaagtgaaaaatcatgcagatgatgttacaaaagtctgctcccttttgttatattaggttaatagagaacttgtttttatcctagtagtgcttgatcttgtaaagttataaaaaatatatccaagagtgggaaatatccctgtaaagtgaggtgacatttaagtgtttttctcttgtgcacaaaccacaggtatcatgctgtaataatcttgagtttaatttataggtattgttaatgtaaaatattttgagagtcatccaataggaatttccctgtgttgccacatcataatgaatagggtggtgtggtaaaatgactaaacctcattgaatgtctatgcaatttttttcactaacagtgcataaaataaattaaattcataatcttttgtgaaactacaattctcacgagcatgatatttatggattttgttacccgcctcacttacagtctcccttggttagttgagttgagtcatctgcattattcttctgaagaaaatgcagagaccctccttaactgagtcacatttccataatgatagtggtaacatttaattatttttttaccaataaaagttggcagacttgacttggtgtatattgtcaaaggacgtagataagtccccgactttggctgccacagaaggggcaaaagaagacatagaaaataaaaaatctacggatggtcgcagtcaaggagatttgtttgaagagaattttaaagaactgaagaaatgggttaatgtgaagtcaactaaatatgggatccttttagtaactcgtgagaggcgagctcaaaggcttgggactgcgttgaaggtattttgttttacaagtcttgcactggttgctgcatgtaactcatctatttatttattactaatttactaataaaatatcatatgacactggagtctacttgagtatgtggactcgatagtcgataatattctttgatcctcagtgagatttgccttgaagtattcactcagcttatagtagataaaccaccaaactacttacttctgaacctcttctcacttgattcaggtactgtgtgacataattcaagatgacgcagagcctgccaagaagaaattctatgaccttaagctctctttgcttgatgagattggatggacacatttggctgcatatgagagacaatggatgcatgtgcgtttccctccaagcttacctcttttctaggacctgcccatcgggaagatgctggacagcaatgttaggactttggaaccatgtccttttcctcaatatttatgtaacactagaccctttacgtgacctatcctttctttttgtgaacatcttggccttggtatttcgaacatggcatgggaactttgccatgccttcagtgtggctgccacatcagtggcttcgtcaatcccatttatattaatttaataataacaaaataaagagtttttcacttgtcttttgttgatttttgttctctgtacctttttcttttataaaaaaagaaaatttagaggtcagtgattcgaaagtgattctgataactatcgaatagtttactttgatattctatcattcttccctcgagtaaaatctgatatcgcctgtttgaaattcgaaaattgtttgaatgtcctcaaaagtttcccaagaattttcatatctcggaagtttgtcccactgaacaagtacttccatgaagctgctggtgtagattgtagctctaaggaatagttgaaactttggaggttgttggcatgggttaatagtttgaatagcttcatgctttatgtagaagatcaagtgaatttgtgatcttacaggtaggtctagcatatgcttagtgaatttactttgtattcgatagtcgatcattttagttttcaatgtagtgaattaatttttttacttatatttcttataaggttaataatgaacaacaaaaattaaaaataaaataataatgataagattaattttataagttgttattctctttcattaatttattattatttttgtttatgaaaagtagtataggatgacaattataataagatggagggtatttaatttgcacgcctatataactgttttgaatatcggactcgggatccgagtaaacgaccagttttagtgtccggtttaaataaatcattgaactggtcttgagaaaaatggtaaaagaataaaaaaattcattcataaattgttaaaataccagtttgttcttagaaaaaaatgctctttttagtaaaagaaatgtttaatatgatatcattttgattttcaaaaattcaaaatttaatttagagtatttgtcattttatttttttattttagatgcaaaattgttataatatttaatttgaattttatgtgttttgaatgttaacgaattaaaaaaatgttatatttatagcttttagtattacaaaaaatattacattataaattattaatactaatttaatcactattggatgataaacggtcgttttaatgaccaactcaattttaaaagcatccttatattcgtttcaaaccaacttgcaattttattttatatggctccctttgttagttcttgaaatcttaaatgttgtctattgtaatcaacaacagagcttcgacctcaattgttgtaaaagagtttgcatatccctaatggtacgagggtctctactaaaaacggcgtcaggttaatgctagcttcgtgaatggcattgaaccagaataatatatatagctgcacacagagtcttatacttcccctattccaaaataattcctgtcccagattgttttatacatactgaaataataataataataaataaataagagaataataattttataaaattaatcttgtatcatcattaatttatttataaattttattgtccacgtgaaaaagataactaatattatattaaaaattaaaataataattattttaaaataatattctttttcttacacgcaaattacaatgagtgaaagaaatactatcaagttccatggtcggtccataagactcaaatataagggatgaaactgctcttagctcactccaccaagtctaatatagtcacaaaatacaatatctgacaccaattcatgaagcaacactcaacaaaaatcatcaaattcacataaatgtttcccgtgcctcaacatgcatgtaaaaataattatcacataacttttagaaaaaaaaatataaatggacataaatatatcaggtactctctaacttctatattcctaacatctttccataagtactgacttgagcattggagttacagttggagtttgattcatacggatcagaagagattatattccaatacttttttcgtctttgatttgtgatgaaaacttttttttagatgttttgggaagtcgacaattttttctcttttatttataccgatatgacattgaatgatgatatatatatatatatatatatatatatatatatatatatatatattataaagactaaatttaatttatgttgtgtgtacattttgattaatatttttattctgtctatcatcttatgttttagaaagtctgcatgcatgtttacattgtacattttgaagcatgatgggagatatatacaaagtggctggtttcctgtttcccacgtggtaagcgtagcaatctagtcagcaaagttttcacgcactagattttgatcaaattcaagcttttcatgcatatatatatatgtgctttcttcaacgccgcagcaacgtacaaatattttttcttcttttggaatagtattactgtttagattacaactgtgatagctgtgcagtactgaatttagaaagcaacatcaccctaacccatacatatttttatgttttattaattatcactatataccaacctcgctaataaaaaatgtgatcagtacgagatttcatttaataatataaaatgtattaaaaagtcaaaacaatataaacatttttaaaattaaaataacagtgcacgttgacattgcaacgcgcaaggagtattgtccttgaagtagatgacaaatattaaataataaatgagaaaaataatgtattggatataaagattgtttcaaatgtcaacgcgcaaggaatattgtccttgaagtagatgacaaatattaaataataaatgaggaaaataatgtattggttataaagattgtttcaaacttatcatgggtatgtaaaaaagaaaaagaaaaaaggaaacggacaaaaaatgatatatgtggcgtgtaatgcatagaaaagatagagagacaaaaataagggtgcaataattgaaaaggatcatatactaatgctctcgtacgggggccatgcaagagaaagacatacaagtatttaactagagttgtgtctcattgatacaattgaatgatatgataacaaacaaatttaattagcattcactttttaaaattgtgtttgatgttgatgttggaaaattaattttggattatgctacataacaacatattaaaagtatgaactgtcttataattcaaaaaacgaattttgatttttgcatacaggtcaacttccttttcataattttttttagccaccaaagaaaacaaaaggcttggggtcaattgctgctcagtctacgtatatcatatcttattcagatcatttgggaaatataaagaacagttgactaggtgagagaaacatggagaataaacaaattttaaaattaatcattatttttttttttttcatattttacacttatcttgcattcatgtttatctttttcctatttttctagtagaaggctacatattacaggaaatatttaagtcgaatacagttcttatgggcgttaattttatttttagaatatttaatataactatgcatctaaaactctaacttgatatcaatagtaatttaaattaaacattatatgttacttttttcccttattttttttcacaacactcattaatttagtcattttcttctaatatgtaaaattcgtcttctgtttttttcttctaattttccggttatgtttctacggacggtacctaaaattttcacgtgtcttctgaagatatgatctcttcaaaccacagttttcacgataatgagaattactactttactagttaatttcaatcattttgctaataaaataaacctaggtgccgcaaatatagatctctaatatttccattttattgtggttttccttcatttcggccttaggtgtaacctcgttttcatttatttctccgcgattagtattatttggtgaaggtaaacttggaaagaagaaaaagtacacgtgtatctatgagattcaacataactttttgccctattttttattactaatatttcctccgtattaattttctaattgaatattgttgacaagtcataaaaagaaagatgattacgatattgtcattgattaagaagagacaaaactcaacacatgaccacccatgtatataaataaatatgtaaaaggtgaaagtaaatattttgggttatgtcatactcatctaattttcttatatccaaaaacactttcttacaatatttttatccaaatatatttaaaatgaataaaaatattagaaaataaagaaaataattattatgacaaattaagacttataaaactaattttaaattaaatgatcaaaataaaattaacataaaatatatagagaaatcttttttttctttttcattattatttaaaactttgtacatatattaaaaaatagtttaacgatagagatcttttaaaaatttaaatataaacttcagtaattaaaaaatttacttattaactataaagattaaaatgaataaacttaaaaattataaacattaactaagtaattaaaacattgaattattagcctttgaaggctagctgtgtgtgctacacacaataatcttttgttttgtttagtgaaagtaaacaaggttggtataattggtaaataataaagtcatattttataagcatgcgtcgtttatgctttagatgtgagaatctttataaatacttattgattccaatgatattaacttcaaatattcaatttatctaaacttttagttattaaaaacaaaaactaaactgggaatacttctttggcttggaaaaactgtttttgtaaatgggtttgaattggtacctatgatgatatttttgctgattaaaaaaagtaaacaaacatggtttctctggacatattctgttataggagacgaaagactcatcataagatccacgagttgctcactccattgaatgtagttttgagttttgacacgtaaaagtagaaaataattgaccgatctgtttccttggctgaagcaccgacttacatctaactttttccctttgacctgtgtgtgtgcagtgtgcacgctctaatccgtgcggctgctctcgctttagtgccgaaaatgtagacaatgcattttttctgtacaatgtttttatttaataaattaatttagtgtttcgagatttatatgggtattaaatttatttttataatttatatgagtaatttttaacatattattaattatttaattaaaattttaataaatatatattattagatatgtcaataaatatttaactatatttttatatacacataggtttcaaaagattataacatcttataacaaataatatttttttatcattataagtaataatgattagtttttaaatttattcagagttaaatatttttaaattttttaatttattgtttactctatttattagacatgtaaaacacttaacaactcatactagaagaatataaaatctcaaaattataatagtttgaaaatacttcatgtataatacataaattcaaataaataagtttttatatgagtaaaaatattatcctcaaaatatgaacatttaaactaaatgaacactaaaaatataatgaaagtaatcgcatccgacaaattattcttaagtactaatcaagttaaaataaatataataaaaaaattatgtcttcaagttccttcaaactcattcatttatttatcgtgctctaaaaataacacttaacaagagttcacaaatagtattgtcatcaacttatgcagtaattcaaaaaaatcaaccataatatctgtaataaatttaaaataagattatatatgtatgtatttacacaccaataaaattcatattaaaataatcataattcatgaaattttgaataaatgaaatatttaaataaacggaaacacctcagtgcatccaaataaatataatagacacaatttagctattttcataattataagattcaattctttagttcttcaaatcagtgtggatctcagattcttcatataagatttatgaatttatatttcatacaataatatctcagtgtcttttccatcataaatgaaagtattcaaagtcttttcctcacctcacatggagtatctacaaacaagtatcattcttatcgtatggagatatataacattataatctcgtaataaaatatatattataattccctcccaaaagatgataaccaactcacaaaattacaagaatatcattcttaccaacagactctctaatttcatgtatccaataataattctcaaaattacaccacaacaataataaaataaactaataaaaatgaaactacatacataacaccaattatgcatgtaatataataattacaaattgattgtgatcataaagttaaattatatattgattaattcaatgataaaacttttagataatgtcaacacgcacgcacacacatgttattttcctcacctcttgaagtaagaaattcatattgtttgttatttatttttttcaactaattacgtcgaaagaatttctccacttttttttttctcaatcgttgaacaacttactaatatcaaaagagatcgtttatgtatgtgattctaagtaaagaaattgtctaccctttatataataataattatacataatttaaaatttgtttaattgatttttccttatctattatttctattatctttaattataattatctttaaccaatctaatatattaacatcttttaaaaatagaaataacaatctaatatatatattaaaataatttaatctatcttttatcttttcttttaccaaaagatgtatttagatatttttatttaaataattattgaattatttttgaaatgttacatttctcccaataataaatttgcataatttttgcaactttcaagttaatgtgtgatatgtgcataatatttgaaacttacataaactctaaaaagttcataatgacggtcatgtacatgtaatttaatttttctaaaacaaaattatagaaaattttcacacaaaataaagtagaaaattaaattataataaaataaagcttttataaataatcagatgtaatttaaaattttgtgtttgaattttttatacacaattatcacaaatacacatttaagttttgttattgtttttagttatataaatgatatattaatgtaataggcataaattgaaaatattatgtttccttttttaaactttgagaaaaaatgggacattcttttattagaatttgatgtgttaacatacacaattaataactatgttatatatatatatatatatatatatatatatatatatatatatatatatatatatatatatatatatataattatatttttgtactgtcctttatattgacatatagaatagatatagatataaaatactaatataaatttctacattatacttacttgtctaaagtaaacaaagtaagctataaacaatgttattttacgaccattattctcatatatttaataataaaaactaaaaagcaaagtttatacgaaacaccatcatacgattgttcttagggtttgaatgattgtttccatggtccaaaaaggaaacaaccatttcaaaattaactttctaagttcttattatgtgcatcacgtctttgaaacacggttaacgaaggtttgaagttagggagaggggttcttgatttctcttctttctttattttttaccccatatatataaggattactttagataactttatatattgtttagctatatatgacatcaatatgaaacaaagaaaaaaaaaacataaatcacgtnnnnnnnnnnnnnnnnnnnnnnnnnnnnnnnnnnnnnnnnnnnnnnnnnnnnnnnnnnnnnnnnnnnnnnnnnnnnnnnnnnnnnnnnnnnnnnnnnnnnnnnnnnnnnnnnnnnnnnnnnnnnnnnnnnnnnnnnnnnnnnnnnnnnnnnnnnnnnnnnnnnnnnnnnnnnnnnnnnnnnnnnnnnnnnnnnnnnnnnnnnnnnnnnnnnnnnnnnnnnnnnnnnnnnnnnnnnnnnnnnnnnnnnnnnnnnnnnnnnnnnnnnnnnnnnnnnnnnnnnnnnnnnnnnnnnnnnnnnnnnnnnnnnnnnnnnnnnnnnnnnnnnnnnnnnnnnnnnnnnnnnnnnnnnnnnnnnnnnnnnnnnnnnnnnnnnnnnnnnnnnnnnnnnnnnnnnnnnnnnnnnnnnnnnnnnnnnnnnnnnnnnnnnnnnnnnnnnnnnnnnnnnnnnnnnnnnnnnnnnnnnnnnnnnnnnnnnnnnnnnnnnnnnnnnnnnnnnnnnnnnnnnnnnnnnnnnnnnnnnnnnnnnnnnnnnnnnnnnnnnnnnnnnnnnnnnnnnnnnnnnnnnnnnnnnnnnnnnnnnnnnnnnnnnnnnnnnnnnnnnnnnnnnnnnnnnnnnnnnnnnnnnnnnnnnnnnnnnnnnnnnnnnnnnnnnnnnnnnnnnnnnnnnnnnnnnnnnnnnnnnnnnnnnnnnnnnnnnnnnnnnnnnnnnnnnnnnnnnnnnnnnnnnnnnnnnnnnnnnnnnnnnnnnnnnnnnnnnnnnnnnnnnnnnnnnnnnnnnnnnnnnnnnnnnnnnnnnnnnnnnnnnnnnnnnnnnnnnnnnnnnnnnnnnnnnnnnnnnnnnnnnnnnnnnnnnnnnnnnnnnnnnnnnnnnnnnnnnnnnnnnnnnnnnnnnnnnnnnnnnnnnnnnnnnnnnnnnnnnnnnnnnnnnnnnnnnnnnnnnnnnnnnnnnnnnnnnnnnnnnnnnnnnnnnnnnnnnnnnnnnnnnnnnnnnnnnnnnnnnnnnnnnnnnnnnnnnnnnnnnnnnnnnnnnnnnnnnnnnnnnnnnnnnnnnnnnnnnnnnnnnnnnnnnnnnnnnnnnnnnnnnnnnnnnnnnnnnnnnnnnnnnnnnnnnnnnnnnnnnnnnnnnnnnnnnnnnnnnnnnnnnnnnnnnnnnnnnnnnnnnnnnnnnnnnnnnnnnnnnnnnnnnnnnnnnnnnnnnnnnnnnnnnnnnnnnnnnnnnnnnnnnnnnnnnnnnnnnnnnnnnnnnnnnnnnnnnnnnnnnnnnnnnnnnnnnnnnnnnnnnnnnnnnnnnnnnnnnnnnnnnnnnnnnnnnnnnnnnnnnnnnnnnnnnnnnnnnnnnnnnnnnnnnnnnnnnnnnnnnnnnnnnnnnnnnnnnnnnnnnnnnnnnnnnnnnnnnnnnnnnnnnnnnnnnnnnnnnnnnnnnnnnnnnnnnnnnnnnnnnnnnnnnnnnnnnnnnnnnnnnnnnnnnnnnnnnnnnnnnnnnnnnnnnnnnnnnnnnnnnnnnnnnnnnnnnnnnnnnnnnnnnnnnnnnnnnnnnnnnnnnnnnnnnnnnnnnnnnnnnnnnnnnnnnnnnnnnnnnnnnnnnnnnnnnnnnnnnnnnnnnnnnnnnnnnnnnnnnnnnnnnnnnnnnnnnnnnnnnnnnnnnnnnnnnnnnnnnnnnnnnnnnnnnnnnnnnnnnnnnnnnnnnnnnnnnnnnnnnnnnnnnnnnnnnnnnnnnnnnnnnnnnnnnnnnnnnnnnnnnnnnnnnnnnnnnnnnnnnnnnnnnnnnnnnnnnnnnnnnnnnnnnnnnnnnnnnnnnnnnnnnnnnnnnnnnnnnnnnnnnnnnnnnnnnnnnnnnnnnnnnnnnnnnnnnnnnnnnnnnnnnnnnnnnnnnnnnnnnnnnnnnnnnnnnnnnnnnnnnnnnnnnnnnnnnnnnnnnnnnnnnnnnnnnnnnnnnnnnnnnnnnnnnnnnnnnnnnnnnnnnnnnnnnnnnnnnnnnnnnnnnnnnnnnnnnnnnnnnnnnnnnnnnnnnnnnnnnnnnnnnnnnnnnnnnnnnnnnnnnnnnnnnnnnnnnnnnnnnnnnnnnnnnnnnnnnnnnnnnnnnnnnnnnnnnnnnnnnnnnnnnnnnnnnnnnnnnnnnnnnnnnnnnnnnnnnnnnnnnnnnnnnnnnnnnnnnnnnnnnnnnnnnnnnnnnnnnnnnnnnnnnnnnnnnnnnnnnnnnnnnnnnnnnnnnnnnnnnnnnnnnnnnnnnnnnnnnnnnnnnnnnnnnnnnnnnnnnnnnnnnnnnnnnnnnnnnnnnnnnnnnnnnnnnnnnnnnnnnnnnnnnnnnnnnnnnnnnnnnnnnnnnnnnnnnnnnnnnnnnnnnnnnnnnnnnnnnnnnnnnnnnnnnnnnnnnnnnnnnnnnnnnnnnnnnnnnnnnnnnnnnnnnnnnnnnnnnnnnnnnnnnnnnnnnnnnnnnnnnnnnnnnnnnnnnnnnnnnnnnnnnnnnnnnnnnnnnnnnnnnnnnnnnnnnnnnnnnnnnnnnnnnnnnnnnnnnnnnnnnnnnnnnnnnnnnnnnnnnnnnnnnnnnnnnnnnnnnnnnnnnnnnnnnnnnnnnnnnnnnnnnnnnnnnnnnnnnnnnnnnnnnnnnnnnnnnnnnnnnnnnnnnnnnnnnnnnnnnnnnnnnnnnnnnnnnnnnnnnnnnnnnnnnnnnnnnnnnnnnnnnnnnnnnnnnnnnnnnnnnnnnnnnnnnnnnnnnnnnnnnnnnnnnnnnnnnnnnnnnnnnnnnnnnnnnnnnnnnnnnnnnnnnnnnnnnnnnnnnnnnnnnnnnnnnnnnnnnnnnnnnnnnnnnnnnnnnnnnnnnnnnnnnnnnnnnnnnnnnnnnnnnnnnnnnnnnnnnnnnnnnnnnnnnnnnnnnnnnnnnnnnnnnnnnnnnnnnnnnnnnnnnnnnnnnnnnnnnnnnnnnnnnnnnnnnnnnnnnnnnnnnnnnnnnnnnnnnnnnnnnnnnnnnnnnnnnnnnnnnnnnnnnnnnnnnnnnnnnnnnnnnnnnnnnnnnnnnnnnnnnnnnnnnnnnnnnnnnnnnnnnnnnnnnnnnnnnnnnnnnnnnnnnnnnnnnnnnnnnnnnnnnnnnnnnnnnnnnnnnnnnnnnnnnnnnnnnnnnnnnnnnnnnnnnnnnnnnnnnnnnnnnnnnnnnnnnnnnnnnnnnnnnnnnnnnnnnnnnnnnnnnnnnnnnnnnnnnnnnnnnnnnnnnnnnncgacaacaaccagattgaacaaaataccacgcaatttcaataaaaaaataatatacaaaaagttcatttttgattgaaactcacatgatttaatttaatgaaaataattatttttttaaataagtataacattttttttcttataattgagatgaggatgaatgcttatttaacactactgaagtgaaggataatattttttatagagtaattgtagagaataaaagcatagtgacccaattgaaaggactgcaccctattattgatgggattagaatgcggaatgacttcccttaacctcctctcaaagtcaattgggtgcccagagttctaacttgaattaggaaatcagtgtatgaaaacgcgtagggccaaatatacccggtgatttgtgaggttgaggtaaacaagggatgatataaactcttgaggctttcatttgagatacaaaaaaaaaatatcaacattagggatcaggtggggcaaattttgtgtgaatctgaagactgaaagattgagttagggattatatatagagagacattatacagacattgtatacataggattggagacagggattgcattttgtgggtccgaataaacaacctaccaaaagaaattacatttgtgaattgaagatgggccaagttccatttagaattgaaattgaaaattgaattgaagacgagttatatatatttcggatttagggtttattcaattttgagactgagtctgtgcatggaaaggcacatggtagtagggtaatttgtgtaaataaaaggaggggaaatattggagccaatcttcttagaaacattattattgaaatcatagtatggatgcacaatgaaacaagtgtttgtgaataaagctcgagacataaaaagtcactaattaagaagagattgagacaaaaaaaagacctcaaacatatttttttaatctatatttattttcattagaaataattctatttgagtgattaggatcactgcattttctctattagagataattctgagtatagttgtatattttttactaaagtttaagactattaattaaactgaaataactcaacatcatttcatcggcctactcattggtataattcgatctcataaactcaacacaatggaaaaactattagaaagattgatatcataattttagtattataattgaaattatatatatgggtttaggtagaaacaaatgctattgcaaatgcaagatgctatatttatttatagtttcgggttatgtagtgaaaaacataaaataacatgaaattaaaatataaattcagaaatggggaaagataattagattacaaataattttaccttttatgcaatatataattaattacacttatcatatgttaacaaaaatattaatacatcttgatttaactgaaattaaatttaaatttcttaaataaaattttgagtttaaatcttataaataaataaaaaacacaattataagaagagattttattaaaaatgattagttaaatttcttaataaatattagtcatcaaagtgaatgaaaaatttatatcaatcacatgcttaaaaaatctaacaaaacgtgaaaaagcaaatataagtttttttttgtataaaataagaattaattaatagtatatacctacccagttatattctctttaggttccataatcctccacaaattaaagaacaagaagttgatgttatttgtataaatggccccttgtcctttcaagatctactttggtaatcattaattgttacagtcattaaatttattttattatatatcttttgcaaaattttcttcgtaatgataaatacattgaaaatgaatgtatagatctaattctagggtgtgccactaacagcaatagccattttgataatggtgttgaagatagcgcaacattgtcaatatctcactcttggttagccaaaattacccatcacgtgaatgaagactaacaataggtgaattacacagttccattttgcttattcacactgaatgttttacatcttttgaagttagatcttgacaaatgtgacaaagaaaaccgaagagaactgtttatttggcttcaagttccactcattgctagctagcttactcattttggatatgcagattgtcaaattcaaaatcttgtattagaaaggtgcaagattttgattatatatgagacaacccatgtgtgaaataaagaaatcaagtccaaaagatcataggcaatttcattcttacatcaattgtccaagaacaaaaaagattgacaaagtcccacaaaaatacttgtatatgattattggatgaatccagatatcttcaaatttctcaaaatacttaaatttatttaagagaaacttttcttctaaaagagttatttcatacatatggacttgactcttgaggatagaattcccaaatacataaaaaatacaaaatacttttacaaccagagtaataatacatatataaacatttatatttttaaaaattcctaatcaatatccataatttttctttatctctctaatcatggcccatcataatatttataatacccatgttatttatttatttatcttatcttctctcattaaatgtataatagcacattgggtgtccataattacttttcctttcaactaaagtggctgaactatgagatgaagtccataggtgggcctaagggagagcatgatagagggtgcatggttataacctggtgaaactttgaaactaaatctagacaggagtagggttaacactatcttatactccataaagctcaagttcctaccaacacacattctccctccaaaaccaaaaggcaagtaccccattttgtggttacatccaccattgacgtcattcatgaatctctctggtctaaagtcgttgacatcttttccccacaatgccgggtcatggtgcatcgccacaacatcgatccacatgttggtcccattaggcactgttaagttatcaactttaatgtcttcccttgcttgcctttgcacatttggtgccgttgggtagagtcttagaacttcattcatcacccacttcatctgcatggcacacgagctcatgttaatttttattacatacagaagtaattaattaattacctaattttggaatattaaaatttttcccttgattttacaatttaattatcgtttcatgcttctcttttgtactttttcctcgtgtttatgtttagtcggctaacaaaatttgattagacctttggttgctcttcgcgctatgatacaaataaaaggaataaaaagaaacaacgaagattcatagtcaaatcattgaccaagtgccatgtgtaaagtgataatttgttaatttcatgctacatactcatacgtgcagccataaagtggtggtgcgggtttagtgctgaagcatgacatgcacaacagaacaccgactttacgcaaacttcaaatataaatgtattgtgggccatttgatatttgaattattatttatcttcttgagcgaccaatataccccacctcagaatcttatatatgaacattgaccaagtagttaatgtgttctactaaagaccaaaagacgtactaattaaatgtaaatggtaaaacacaaattcaaattctatagctattaatttgatagtaatttttgttgagtaatttttaaataacaacatatcattttatttttccattacttgtgtttgaatttattttcatatttaatataccaattaacctctaatatatacaagattttgaattctacgatctcatccttgccattaatgttttaaacatagtcgtacaaagcagtagtatgaattctggaatgttaaacttaattacatctctcaaacatatgtggtcaataacggtatatagtcaaggtgagaatccatattaagtcaattagaccctttctcattctctgcatgcataggtcatctaacctaattaaggacatatataatttatcagtctaaataaacttaatggcatagtagtataattttggtggtcaaagatcatatattcatatatatgtggtagaaattttgccaagatatatatcttaaaacgcaaaacaaatttaaccaaacaaacgctatacttccctaccattaattatgaacatatataacgtgtttaattatgatctatgcatatgagtaaatgagattaagtatgtgttacctttctaagccccgcaagcacgttgatatcaagttctttatcaccgaccacttctcttatctcatctcttaactggatttgccaatcttcatttatagctagaagcaacaaagtccatgagatagccaatgccgttgtttcatggccagcaaagaagaaagtcttgcactcatccaacaagtctctagtggtgaatgtcttccctaacttgccatcaccttgatgattgtttccttgcaacaacaatcccaacaagtcttcttgagtttgtcttttgattgatttcatacgagatgttatgacggataacaagagcttgtcaatctctttgccaagcttcttggcctctagggttttcttgacgttgaaacacttgccaaatggaacacccacatatcttgttgtcttaaaaagtgtcatttgtagggcacgtagtttttcagacacttcctttgcatttttccccttcatgccaaagcttgtttttgcaataatttctccggccgtttctacaacctctctttccacatcgatttcggggtttccggagttgatttgtgcaatccacctatctatcatctgatttgtagactcagtcatcatgcttgccattgcctatatcatattacacaataaaaatatacacgtgtcagaagaataaaaagataactaattttcttttcttgacaattggtgacactcaagataatatcacgaaaacaaatttgcccttaaaatttttgattaaattaaagaaggaaattttgtgatgaactctctcaaatggaatttgtttggagtgggctagtcatagtaggttcctacaaggtgctgttacttaggtggctttctttatttaacttttttgtggcaaaggagtcttaaagttaaacaacaaattgggtaatgtttctatatttagtatgtaaagcatgaagatcgtatcaaggacaaacagcatttaaaattgtatacaaaacatttcaaacttcaccatgatgccgtgtcgacaattttcgctaggatgccacaatggtctaaattgattgttgaaaattaaagtcatgcagcgattgcaagttgaaactaggtcttaattaacatgattaaatatgttctctaggttagtagtatatatgtctagctagagagagaaagagatgaaccttcaaattaagaggagaaaatgctggtgctataacatgtcggtgacgaacccattcattgccttcaaccataaccaaaccatttccaaacataggatctctgtcatgtctaaacactctaggttttccccatctcttggccaagacctctgtggacatttttttcaaaattctggatctgcaatgtacaaaaacggttctgtaccaagccaatagataaacacctttcctgtagaaaaaaaataagaaaacaagtcatacatgcatacatacacactagtatacatacaaagtacgtgtgtgtgtatataaatagataaacgtgtatttgagttctaacaaaacgttaaactttatgcaataatttatggtattcttagttaaggtgggatgctttaaaagaaaataatccaatttattttacatattagaaactaatttacgttatgtatgttatggaaattaagcataagcataccgtgagagttttgccaccgaaaaaaataggggaacacagtggagtgtatatcatgggtgagattagaggagcccaatgaagaactaacgctagttttctttttcatctcttgaatgtttccaagaggaaagcttgggggtggccctccaaatccacatcttttaagcttaagatggtttatgattggtgaaacccaccaagaaaacgttagtttcaagagcaaaagaagaggtaaaatagaaaagagggcaagtgctgagaactccatgatctctatcacagtttttggttatatatctcttataaggtttcagaattggagctgttaataaatgctaatagctcaaattctatgtgttggatatgcaaaagcaaagtgcaaaatgggggttatttatagagtgacttggttgggtagcagaagcaaaaaatgcgtggcttttgagttttgaccaatgaagaagaccaaaccaatgtttgaacattttctgaggttgctcggccttttagactgatattgtgtttctcactctttgcccctttctggacgcatctaatttggtcggagtacaaaatattttagaataatgtcatttcatttccgtaaaatactatttcatttcctaggcataaataacttttgttattaatatagagttgttttaattttaattagtttgttaggacttttttttacagcaaaaaaacctatctatatattttgctttagttataagtctttttcatattgaaatattttttattttaatcttcagtttttaagaaatattattttttccaatctttaatcacattatcatcacttaacaagaataataaacaaaatgataccaaaacagttataaaaacacaaatataaaaataattaaaaagacaaacagaaatagctctgcatcataacaactaaaactttatttaaatcttaaataaaatttatcctatagctacttaaataaaaaatttaatattcttttcatcttttaagagaaaatttttaaaatattaaatccttaataatacattttatgtaatattattcacgtaaaagaatattaaatttaatgtggtcaataatcctttgccgtaattcgatcttaataaaatattatatatttaagcctacaaaatatcattcaaaccatcaacttttttttttgtcaatttttcgaaaaacattagtccaaatcaaaatgtatgtatgcatatctatttctttatctatcaatgtatttatcagggctatgtaaaaaagaccataaatcaaatgaaacaaaaaattaaatcgatgaaaataaaaaaagtcaaatcatttaaaatggttttcaaaccaaacatacaattcatacaatatcaatttttgtgtttatctctctccattgttaatgtgtaatagagaaaaaaacacacaaaataatattgtagaaattattgtacaaataatgtttctcttatttgaatttggatataatgtaccatttctatattaaaatttaagataaagtgtattggttttttaaaatcaactttacaatataaaaaattggttgaaataaacttcgttcaaaactggtttagaattggttcaccataaaccaaaccactttgttaaattgtaaactagttcaggacctttagattaaaaactaattaattcattaaaactgtttggtttagttttatttgattttctttataaaaaaatgcacaactctactattttatctatctatatgtgtaagtgtgaggaaattggtctaagatggttaaaaaaaattggtttttcaataataagaaaaaggttcaactttgaaaaccaattgaaaattggtttagaacagtttagaacttgttctccaaaaaccaaaccattttgtcaaagttcaaaacattgataaaccaaaccagtccattgaaataatttgttttttttaatatataagaaaacttaaccatgcacaaccctactatttatttgtctatcagtatatgtgtatctgtgtgtgagagaaagttattaacctagagaaagagagtcattttatacgtgagagttgagtaaatttaagccatagaacaatacattgataataaaaattaaaactttctaaaatcttatgatcaattgaaaagttacatgattttgttttaaaattatataacttatgcgttgtatgttttgattctaaccattcatcatgaaatttaagaaaaataattctttagtttcatcactatcacataaaataatcttattaaaggaatattaatgaatattgttatacaaaaagaatgaatattaactattaaatcttaataaaaaatgatgtatattaaaaacgtgtaagtcatgtgagtttattaaaaaataaatgatctcatcacttgaaaaagtcttctacattttatttttttttcttgtgttattaaaattatttaaaaaaaatttcaccattcataaacactcacacgcacgggttaaatgagtaaaatatatcaatgtaaaatatagacgcgtctacaagattacatatgcacatgcatgcagtagttcaattctacaatataactttaaaatggaagatatgcatgagacgttagaatatgcaattgtcatttttccatccaaattgtttagccgggtggtcagtgatttgctggcctcacaacttccaaaggaatgatatatgattggcttccatatgtagggttcggtttgtttgtggccatctaatcttctcgagcatatatatggtccaatgctttgcaatttgaagtgttcaacaccacataaaggctgtactcaagtaattgatcattatcattttacacacacacaagttgtcccaacctaaaaaaggtacgacagatcatgaaatattctcccattcctattgcccaaactaagactaaattaatatcacattttttgtaagcatataattctgttaccttattttgtattaaagaatacgtatccaaaacaacatatagatatgagtttgatttgactccaaaactagtttggaataaagatggttttaggtataccatcatctcacgtggtgtaggatgcaccacttttatccatcattagattcatttaatctcaccattcttaccatatatatatatatatatatatatatatatatatatatatatatatatataatattatatttctccttccccttcccatgttttttccactcattgctagaagtaatttttggctacaacttcctcaccacccatcattgtcattcccctcttgtgacaatctatcatcgtaccacaagtcattgtgagctatgatcaaaggtaatttctaatggtgacactattttacttcttttattatttatcttctttctctccctagatttgctccataagtcattatcgtcgcatgcaactttttagtgacaatgcttctctctaaaatatgaagacatctcatagtattcagttaaaatgtcttcatttttcagagagagaaatgtcgttgttagaaattatctttagcgaccactcttccagaggtgggtggtgatggtgttgcgagctaaaaatcgttctaagaacgaatgttggaggagatctaggaaggaggaggaatttgatgtgaaaattctaggataagattggtgagattagatgaatataatgataaaaaatggtgcccttacatcacatgtgagggtgatacaccctagaatgtatctagaataaaattgaaaaaaatatactacatccatttttaattataagacttttaactaattcaagatttttaagaaagttgattaatttagttagtagccttaaatttattaataatttacattattttttttaattactcttaaaattattagaactcaatactttctacataattaatatttaatgtgttagtgattttttttcatttctcataagagagataatgactttatcttattaatttatgataattaatctaaaagacaacatgaagaaaacataaaaagggacaaataaatttttttagaagtcttatatttaggaacataggtaatagtattttatgtgcatgtgtgaaagagaaagagaaatattcatttatttttttttctttctatttcatatatttcttatacaaaaacaaattaactatataaatattttataattataattgtcttcaaattgaaaaatatattatcaatatatataaattaatagtctttgggagcatttttaaattatttaaaatgtttgtgcccatactttttaaatcaatatatattatctaattacgtattgccgtgtataataaattagttgattattttaataattactttaaaaatcatataaaattaaatttctgattaattaaaatgtaaaatattgtaaattaagcgtatatgaaaattaaactcaattttttttactaaaacttatatatatgataatcgtaataatatcattcagtaattttgttgtcaatttaatttaagaagttccaaggaattatcatatccttgacgtaaaaaaaatcattatgattcatatatatatatatatatatatatacaacacatgtatatattatgcttcaaggctaacacaattaaaaaatggactaaagtatattttaaaataagtttttttgctacttttaaaaagtgttatattttatttatttattttaatattttagctataaaatgtaaaattatttatcaaatgatttaaatatatttttacttgcaaatataatagtttttgtttttaatatatatatatatatatatatatatatatatatatgtgtgtgtgtgggggggggggggggatcctgcaatatgtttgtatccatagttttgtagagactaaaaacatgaataccatatatttttcaaggactaaaaagtaggaattaaaaactaaatttattggactagctacatgtttcaaatgaaactagctagaaccttgaatatttgtaagtcttatcaaatcatttaattaatttctcataacatttgtttttaattgataacataatcaactaattcaatatttcatgaaacattttggatagttaacttttagtaaaatttattagaaaaacgcaataaactaattcaatatttcatgagcacaataattggggttgtaaaggacgtgataattttttttaaggaaagggtgggattaaatttgccttgtgctttaatgattattgaactaatacacttaacataaaccattaaaaacttgaactactacaggattgaatcatgcaccctcagcgggtgacaatgagaaggaattaaggagaagagtacaacaatgagtagaatgagaaagaaatggatgttggaagattaagggtgtttatgttaaaaggtcgttctggttcagcttaacttaggtttaactcaattgagacaaaagatttgcttgtgattgccagtttgccatgtttcaaacaaattgcatgtagtcctacacacactaaatcacttgagcacctggtatggtctcgcgtatactctttaatgggattaattatctggttatacatcaagcttgttttttgcaagagcgaaaccagagtttacccacaaaaaaaatagagttgtttgcaacattgtgctatagtactatatattgtatcagattttaattggtctttttgaagttttatttttggtgggtacatagtgatgtaattcattgaaactataggctatatattttgggttgtgggtgctgttatacaggacagtaccatgatatgtaacttttggattggcttggtcacttctagtggctattctaatgctttgtttgaatgaaatgttttgccttttaaaaaaattattttgccttgctagaatcgtaaaataaaaaatgtctataaataaagagttaactccagagttttgacaaccatggtctctttggttagtgagaaaaaaacatggtttttcctagggaacacatttgatatatatgcatgagagctgtcctacatatctcaacaaacttagatcatggaattggtggcagatagctaaaatggaggttaattatacaaatgttatgctgggttttgattcaagtctacacttaggtggagcagtgtctctcatatcacagatcatgggaggggtagcaattaattctttattattttggtacgtaccatagagtttcgtaacaagctgcatgctgtacatgattgaaattggttcgatgcattggtgcagagtactaattataaaagttacacttgtaatagtaaactgtatataagtaaacaaagatgagttacaaaattacatgtaattaattaaatggaaggttaatttgttgcgttctagatattagatactactcagctatataattagaggctgcgcccgcggatggaatgtctcttttgacggtgcatttttctctctcttcctaacaaagtcataattgttctgtaattttttcaacttattcacttcataaaaaagtggaccttaaacattctctgaattgtttaattaaactttaaagtgtgaaataactttattctgtctacaatgccatcactgtcgcctaaagtttgtaaagaaaatcaagctagttaaagaaccattactttgatctgaattagaaaccaaattcattctttctttcttactttaatttactcatcattatatcttcaattctttataaaataattaaaataataattttatatcgttacgcgcgattgcatacatgaatcgaagagtataagaaaaatttaattcaagcgaagtaactagtgagatttgaatatattgaattgggtttgacaaaacttttcaataacaaaacataatcaacgagaatcttgttcgcgcgaatcggttcaagttgtcagattaattcttttttccctagcaagctaaagaataatatatttcatggagatttttttaagaaagacgccttatgcaagggatagaatctatatgttgcatacgagttattttgaaatttagtaatcctcaatctttttccttttttaagggtctatctaaatgaccctaggtaaaaataggactaaaaaaatttcattttaaataaccaatagaatttagataattatcttattactatcattatcattaatattatgattatcatatttaatacatcatctttaatttttctttcatatcttttatgtgtaaaattaaaattttatatttgttaattagaagttaataattaaaattaaaataaaattataaaatattaaaatcttaataattaattttttaattcactttaggtaaatagtcattaaaaaataaactttagataaatagttttcatttatatattttaaagcttctaagtataatactttaaatattttctaacattttcattataatttttaattaaaaattatagataaagagtatagcttttaattataaattataaataattaattgataaataattattaaaaaattacagccatatatatttttcctaaggttaataaagaatataatgattaataaataattattaatatttaatattttataattttattacatatatatttatgtattttagcataattttaattaccaattataaaattataatttttcatatatatgatatgaaagagaaatttaaaataaaacattaaatgtaataaacataacattaatgattgaattcaaaataagataattatctaaattttattaatgattaaaatattgttgtttaaccccatttttagttgggcttaattataaaaaaaattaatgagaaaaaagaaattacaaactaaaacccacaactgaaagttgtggaaggaaaatatagggagactaataaaatcggaaataaatcaatttttatgcctacttcaatttacttggttatatccattcgctaacaagtctgaagctctctctacaatcagatatacatttcaagacttatatatggtggcaaatcaattggtggacacaatcaatgataaataaaactataaaatcaaaaggctttcgagttatgttgatcaccatcaccttatatgatgttaatttttttatttttttatcgaagttaaacttgagtgacctataaatctaaatatcgattagtaagaatttggcacttaaagtgagatgatgtgtaaactgagaaactaaaattatatctaccattgatttaaaatttttaaatcaatggtaaaagtattcttactttctacgcattctctcactttaggtaagctaaatgcaattagtaatcatatggaggtatgtcctacaatttcttttcattttttataaccaataaagaaattattaaataagaatacatggatgctgcagggctgatgagattttttatgttatgagaaaattgaaaaaaattgtacctttgtaatcatttgaattttatccttatatttgttttttttaaatcattaataatttattcataggtaagatttaaaaaaataaattcaatagaaatcaaagcaaaattatggaacctactttgtgacaataaatttcaaataggattttaacaattttaaatttgataagtttcttttagtgtatgcaaaagtagaaacaataattaatattattttctaagttacatatgcaacaataaaacaattaagtattttgaaataatttaatatcttagagcttgatttcagttcaattgttaaagtttgaatcataaatattataatttttttatcgacatgtttgtttacatagttatgttaacactaatataaatgaaacaagataatatatcatactttatctttcacattctaacgctatacttaaattatcgattctttttcttcccaaaattgtggatagatttttgttaagtggaaacgtcattgttagttgactaattactagtaattgtctccctataagaaatttactaaaaaaatatttaattttttataataaaatagttatataattttaaaattatataaatttttatttatataaactagataaaaaaaaaaatggtatccatctaaaaatgaggctttataggcggtcactcatcttgactgtcatgctgtaaactattatctttaggtttatgtattaatttcatcgttccctttggttatttaccgtgcatggaagtgagcattgagttctagcagctgaattccttcatgaagtagctacaacctacaggttctgcagttgtgaactgtgatcacgggtccaattaatggtgtctccaagagaagtgttaggtaaagaattaggaacctcattcgtggtagtgttaggcagaacagcatcacaagaaggaaaacacaaggaggtaggagtatatgtacgttagtggtaataattataggtataaatatagtaggagagggattagtagctatatcaagaggagttgctacagcacagtcaatgatagatgcattaaaattggaaggggaaggtcaattatttaaatttaacttctctagtatacacttagtttttcatgattaattaagatctctctctatatatacaatccattgctacctttagatctagagtatccaagtatatgctccttacaagttacaacttctttcaatgcttatattatgattatgattatggtaagttttaaggcttcgaacatccattaatattggtacggatgtacgataaaaattagcttaagtgttggaagacctagcagggtagaacctaagcattcgttaggtgcttaaccactgacctagctttctaggcttctagtgcctaagatagcgctctttttttggcacctaacccaaggtaagaaaagggttttaactacaattcattagccacagtttataactctcaaactagtaattagtaatagtgaataagtaccagtggttttatcttaaaaaaaagttccagtggtttatatatgttaaaccatagtaactaactactagggattttattttcagtttttcactgttagtaatgaatgaaaccaaccccattaattaatttttttcccctataccttatcctctctctctatctacatttgatcaaattagccttcaatacgtctcaaaatgtttgcctttccctctctcttagaacttaggttatctcaaagacagtctaataattgatagttatgataggtggggtgaacaagcaccaaataatgttgtctagcttggggttctgtttctcatattcttctccttttcaattttgcttgcttcttttgtttagtgtagaggagataaagcttcttgtaccagaactcaattatcttttagcaaatttgagatctataattaacttagctgctgcatgtttaatacgtaacagcccgccatatacgccatctatacaaatccttgagatgtcacgagctatattccttcttccttgttacttataaagaaaaaaaaaattttgaagtttaaattatatcaatatacaaattaaataacggtagtaattaattcaataattaccaattaatgtaaactctagttgttcataactcatccgatatattcaaattttataattctttgaagcttgataatttatccgatatatatgacttataaaattacaaactaactttgtcccaaatctaaatatatattagtaaaggaagtgtccaattacattctttaaaagccttttttttttctttctttctacaaggataattagaatacaaaagcttgacagtgcactaacaattaatgtatatataatacttttctctgtatcgagaaatatgacaattcctttctttgccggtaactaagttacacattgtgaatcatggccttttgtaagtgggtacttctggtaccgttttatgaatatattaactttgtttatatataaaaaaaacttttctgtatcaacaaaattacttgtaaacatgatgtattatttcgataatataaatatataattttaatattaatactttatttttcattaacaaaaagtatactaataaagacaaatttaaagtcaaatcatatatatgatatttttttcgtgctagttataggcgtgtctaaatgtcaacgcttctataaatgacactttttatggcatgtggtcctcttttcacgttgcaggaaacgtgaaagcacttttacgagacactttctaatatattttttattattaattaatttctcttaaaatttatataattgtataaattttatatcttattttgtagtttttgataaatttaatcaaccaaaaatattaaaaatatgttaataagtatattgctagctaatatttttcaacacatgtttgttttcggctggtcaacacgtagttttaaatgagtcaaattgtattttttgaagaataaacattttcactccactagtgtttgtagaaatttcaagggttgacgggtgctatggccccattggttctgcctctcattttatgataccacatattatattatcattatcaaaggaaaacaaaatactacactcttgctcttggtttaaatcctgtccaatcaatttgttgccacgtttctgtctaataacactagtagttttcaactttcattacatttctgaaagactttgacaaagatgtattcttactatattagttaaggaacaaaaaaaataatatgtaaataataagagaacacaaataaaatcattcaaatatataaaaaaattataaaaatataactttacatgtatataaaatatattttatactctttatttgttaattacttagaacatggattaacatttgtcattaagaaaataagatctcagccttcagattggtcattcccatcgtcaaagcaaacgttaaaagcaaacataattttaaagaggtccttattgcgtttccgaaaataagatctcagcattcacattttctttttttttttcctatttatcacttttggtgacaacatatacttgtgagtgacatcctgttctgaaaatagattacatgttccgtgcaaggattgacatttaatttaaatattgtcgggtgtgaacatttcagaaagcagaacaattaatatagcaaagtgcatccatattctatgctatgcgtaggttttcacacgacactattgactatcctatcctgaaatgacacataagaaagtcaggagacgcagtttcatcatatttgtctttacgcagtagcataacatggacaaattctactaagatctgatgttaaataactattctttaaaaacgggacttccattttttttcctcttgcatttagaatatatatatatatatatatatatatgatcaattgacagcaaggtgtcaaattaaattttaacaccaaaatttcatttatctattttggttcaatctaataataattctcatgcattaatcatgtgtagtccctcactaaaaatctctcgtgaccctttctcattaattagtcctctcattcatcataatttccttttgttcaacaaaattaatcaacacgtactcctccgttatatataaagttaagtggaaaatcaatagctattaattgaaattttaactttacaataatcattagtttaatttaatctaatttaataataatgaataattatatgaatcatattaatattttttattatataatttatgcacatagttaaaatattttatgataacattttaaataactttatgttattatgtaatttagatgttataatactttgatttaattttatttagtatacttaatttttagatgttacaatttagtatgtatactttattttttttaatttaattgaattcaaattttaaatgaaataataataataataaactcttaagtatactaaataaaaatacactctaatactaagatgattaaaatgaatgtttaagctaatttttaattaatttttggctggaaagtacttcttttattgattaaaaatatatatttaagcaaagctctttatataaaaaacatgattcttgtataagaaatgccacatcaaatgttcgaacaataatttgcaaggccggtcaacatttccatagcaaccatttaatactctgaacagatataaaataaactacaaagtccacaaccacacataaaactttaatattttgcatatatgccaatcataaattggtttcagtcagaaccaacaaccaccatttttggttaaatttcacatgtgatacaatgatcaatgatggagtaaggatctaggaagataaataacatgtgtctggcatatatacttcacttaaatcatgaggaaaattgtagaggcaaacagaaaaacaacctaaaaataatctccaactttattctattaaagactgagatcacacatgcagtaattgtttctcaagttttgtcagtttcctaaaacatgatatataccataccactttccaagaacaatggtaaacgacttaacgtggtcacaagctctgccacaacaattaaggattgcatgggctcatcttgtcataattttaaagtcccttccacaaattcttcaatttggtcccaactgccaatgaatctgagcaattacatgcataaatcacaacaatttcagttgttgagataagtcttcacttatagcataaatgattttttttccaaggacttttaacgccattagcataaaaagcatagttttcaacagttataaatgtcactgctggcttgtatgtgcacatttaagtcgttaggataagtattcacttatgtatttttcccagcaattccaatgtgtacattcaattaaatattttactattatttgttttaaaaattaaaattcataaaagaaagtagaaataatttagattaaaggtgaatgactctgaaagtatagattgagactcctaataataaaaaatcctttttatactaatatataataaaaaatagatgctatgtgatatagttgatcgaaatttgacatttcttttcaatgattatattgaatgaattaggagaaatattagtaaagtacagttaattaaaacatttttacgaacaaatttattattaccgactgaaatttattgaaataataattttgttcatttcattttttattaatttaatgaacttcattcatgattttatagttttgtaaaaaaaaaaaaggcctgaagttgttgttacacctgttccttaaatccaaggcttaaatacctttttatgcaaactccataaggtaccctacaaaacatgcttgaaaatcatatgcaaaccccctaaggtaccctacaaaacatgcaatagatatgaatcatatggaaaaccctccaaggtacccaacaaaacttgcaatagatacacatggaagatatgtaatccccaccaccaagagagagagagagagaaagagagaggtgtcgtgaaattcaatagcgaggctggccaaaattaagtcttccacaataaattgtgtattttatacatttttctattgcctcatatgttttcttcctcctcttgctcttggtctagtgcactctcttttcgtcacggtcttccaatgccaaaggctaatgatgatccctttgcaaaacgtgatccatcttgcttggattcaatgcaaatgcttgtaaatcctctcagctccaccactcttcacactaatattctaacctttggaaacgttgtagttggccatgatcttggaatagggcagatgaggtagaaaattgaaaatgtggaaagtttacagccagtagtgcagattattccagtcataaaagtaaatgtatttaccataaatattaacaaagtaatggtgaaaattttacaaataaaagataattaaacttaactgtattagtagttgtattaaatataaactatattaaataatacgtttgatagcacatcatcaaatacaaatataaaattcataacatattttcagaatgatatatagtaaagctttttgtacagaatttaacaatcgtataagtattaactatagattctgcgttcaaatgtttacttaaaattactctttattgaggaatgaaaagagtagaagaaaattttgcattaatttcagtagtttagccaaggagttttactttgttgtcgaatacaaggctttctctgtctccctttctcagcttctatatcaactacagcgacaatgcaagtttcagtttcgttcagtgttttctctttgtttcgtatttgtttggagaaattaaacttcctcggattcaaacgtgtggatgagtttaaagcaatatcagcttttttgagtctaacaagcagcctcgagacacttactgtaaaagttgcgtagcggtggccacaatgtctaggggacaatgaatattctacacagtgtcactcggcattatccaatcagaagtttcatgaatttcggtgtgcaacaattagaatctgaatttgatttgtttttgctttttttgtgtttttgggagtgagagagggagagttaagtcannnnnnnnnnnnnnnnnnnnnnnnnnnnnnnnnnnnnnnnnnnnnnnnnnnnnnnnnnnnnnnnnnnnnnnnnnnnnnnnnnnnnnnnnnnnnnnnnnnnttggaaagtacggataatgcttaatttcttgtgttgggtatatttaacgacttttggtaaccaattaagaaacgtgttcatatgaatgtatacgaattcaaaattgaatgtaataattgattagttgaattaattaggacaattttcaaaaactatttttgaaaagcagagatgaaaatatatattaatagaacttggtgacaacgtacaagtagtgcaaagacacctagccaaaagcaaagagtgatactaagataaagccagccagcagcatacagctacaaagcttaaaactggtttaaaactactattgcttccttaaaaaaattccctcaactatttataccattcaaaaattaagccacaaaaaagacgtgacccataaaaataaagcttagtaaccaaaactgagctaagaaaagtccagacaacagaaccaaatctgagaccacgatcaaaatactcatcataaaagaactcacaacagaaacaaactctgattataattgttgaattaattgatcttttaacctctggtgaactaacaagcatctactcaaataaaacaaagctagaccactaacacaaggaccgttgtttttctgtttgtggtccatgacccattgtttgcataacttaaataaatatgaaaaccttgctttttcttttttttttttccaaacaaaggccatatccataattcttcacacgttataaaatgtggagttgttattctaacccctaattttatgttgccatgtgttttttgaaaattacttccaaaatacccttttagcataaataattttctattgtgtaaaatataccataaaattgtattttccttgtatattttatataagaaacatatttttattgttagtttttnnnnnnnnnnnnnnnnnnnnnnnnnnnnnnnnnnnnnnnnnnnnnnnnnnnnnnnnnnnnnnnnnnnnnnnnnnnnnnnnnnnnnnnnnnnnnnnnnnnnnnnnnnnnnnnnnnnnnnnnnnnnnnnnnnnnnnnnnnnnnnnnnnnnnnnnnnnnnnnnnnnnnnnnnnnnnnnnnnnnnnnnnnnnnnnnnnnnnnnnnnnnnnnnnnnnnnnnnnnnnnnnnnaaaaagcatgtacctcactccatgaatgaacaaaatgataatccccttgttgaatccttttcaaagcatggaagttggttgccgaatgaggtgtgatgttaaagtagaaagggagaagggggtggggtgtcatgaaagagcacctaaggtgatcaaaggagaagggaaagaaaaggggatgtagaaaaaggtgggagggtaaaattgtctatttattttttggaaaatctggaggtgaaataacaaaaaatggatgagagtagcaatcccttaaaatggacccatctaactaaactctaacaatgtgagcccacaaaacaaaacagatcgtacaacaaagatccaattgatatacatgcttcgaattttcgacaccaaaaataaaattgtccatacaaatcattattcctgatatttacatgaacactattttcaggcatctctctcaatccatttcttggtccttatatgaatgaacgcaacatttgattaacttttaaaccaccaaatcaaataaagttagtcaataagaaaaacttggagaccagtcagacgcacttagcttccaacaagtctgtggtgttaaaatatgtcaattggccacgggtcttaaatttgatgatttagagaataaaggaaaaaaaaccgtgtagtgaattaaaatgttaatcatatagcaatatgtcatcatcgaaaatagactatgcctaacttctcccaagcagcattatatgtttgatcgcaaccttcatcttccctcaaaggcaaataatcttcctttatcttgttggtccccataattaataacaaactccactgcatattaaaggacctattgtttatgcgtgtgtataagagattaactagacctttcaaaagtttactctgaatctgagattctaattaatattctgatatatatatatatatatatatatatatatatatatatatatatatatatatatatatatatatatatatatatatatatatatatatatatatatatatatatatatatatatatatatatatatatatatatataacaatgaatttttctaagaagatcttatagctttataagtattttaatggcttaattggattggactacatatattatatttttggtaaaattgtatttttagttccccattttatctccagttttgtatttggtcatccagtaatttaattcacgaactgggtcttcctattttgtaaaattgtacaatgttggtcccctaaatcacaattgggcattgaccgttaacaagtgatgttgactgtcacttatcacgttcttattggatgatgattgccacatgttctattattggatgtcaactccatgaaaagatgaaatgcattgttgttttcattgaccaattagaacatgacacgtgacagtcatcatccaataagaatgtgacacatgatagtcaacatcacttgctaacggtcaacgtccagttgtgacttgtgggatcaacattgcacgattttacaaaataagagaactcaattcgtgaattaaattattggggtaccaaatccgaaactagagataaactagaggaccaaaaatataattttttgtctatatttttctaaaacacataatcaaatatgttaggaatcacacaaccactaaagacttaaagaatttgtgttatcgctcgtgcaaacatcttttagattctattaatttgatagagaactaaatacaaatacttattagtaaaggaaatctagctcaattaatttagtatgataagtgagttatttttaattttttcaatttttatggataaaaaaatatacatttattaattaggctttagcctaataaacatgtatacataataattttcactataaaaatcacatgattgcataagatttttttaagaaaatacaaattttaaattatcaactcaactgttttttttatttacaaattaaaactaaatatatcatcaaccaatatatagaagctagcttagagttaagaaaattaaaaaatttgaaccgaatcttaggtggggtttccacatcaatctatgatctgactaaaccgaggtatcctcagtaaaacgatttgtcagctaggtttaaataaaatgatagaggatttggatatcgtgagtagagagccaaaaacttcttgtcggctatgatgaacattggtggggaagagatatataattaggtggaaccctaagccttatcattaatagatctgtctaccttggtcaagaaacgccaagtgtttcaattgtgttagtaaagcaacaaagatcttcgcactcaatcaagtgatcgatattaataggaatgaatatatatttttttgttggggtgaaaatagtattagccagtagccacaaatagattttaagtaaaggacaactttaatttaagatttaagtgtagatttggtcctacaataaaggagtaaggaatgttgtaatttcctagtttagtcatcgtcactatataataaacttccagcctcgagacgtatgtcaactatatatttctgcattttccccacaataaaaaaaactatatatttgtgcattggttttttttgttcttgattttttttgcggtattattattggaccttgaaccgataataaaaaaactatacatgttgttcatttaagggcgctatttctagttaaatattatattactaaaaacaaaaacaaagtatcttttattttctattaatacgtttaaataaaagactaatgcttcccttctctctcatgcgtacttataaattattaaaaatattgttatattatctttaaaaaaaatagttataattttttttattaatttttctataaatcttcattctttttggtagataaaatttaaagagataggacgctatttcagttcaagaaaaaaatgtcttgagagttaaaaaaatatatctatacttacatttatcttattctaaataaacaaataaaaactgaacctacaatgtcaaatacgaaatcatgtctacaatatcttaaaaatataaaacacaactaatacttatatataaaaataaagaaaaatattagtaggaggatattttaacccaagattaatattttttttattaattcccttaaataaattaaatactacacctggccgggtccataccagtgtgtacatgttcttgtttttattcataaatcacaagattattccttgaagaattaattaagccgaatagacctttagtatgtatttaatcagctggatgtcatgattgatgcctccacaactgctcataagaatgcaccacacaaatcaaaagttgttgaatcattgccttaaatacaagttttcttgagaaggttttcagcaaaagaatattctacactaatgttagactattgtacacatgattacacacacaataaaccaaaaattaaataaaatcgaaagtgtatatatatatatatattaacactattataataataaagtatagacgtacgtgtgcgcacttactaggtgttactatttaagcgcaactatgaagagacaagataaagcgcgcagtagaagaatgtttgacgttcacataataaatactagtgaaagctgcttcagtaatttcacaagggcaagcaagcacacacattgcgtactcatctacgtttcatcatgtcacaccaagtgaatgtgaagtgaaacaaacttcacagtgacataactttggcaccaatagcccctaccctttctctttgttattctataaatcagaaaccaacccacaactactttttggaccacaccacatacacaatacaagctcatctggtcctgaatttggagaagaagaaagttgtttaatggtggatgagtagtggtgccttattgtgggtggagagttccaaagggatcgcattgatctaattcttgtagatgcctgaacttgcaatcttgaatcttgcatgcaattcctggatttaggtttgctttaaggggttcagttattggatcatgcgatcccttaggaactttccatcaattttaaattttctttgatccatttaaggtaaaactgaatcttttaatatatatgtgaaactctactttgagtctttcatcttcttatttttttattggtaaatgttagtttgttagttttgttaaaaagtttttggtactctatgtaatgattgtatatattatcatcttgcataaattaattgtgtagattttaattttcttggtatgatttttagacatgcatatagctaattaatgactctcattgaagtatcagtttgtgtcttaattagtctgcctgttgatttagttttttagaattatgcctttttaagattattacttttttgcttatagtaaatttttgttgaaaataaacttgtttgaaagcaattattagcccatatactatactttgtttatatattatgctcatgtcgaaatgttatagaatgaaatacaacagccaagttgattaatcttttttagagacataaaaatatactctgttccagttgtagtcatgaatgattaatccatagattgttgttgattgcatcacagccaattaccataatttcaatgtccagaagttttcactgccagatctcgatattttccgagctcaagtaaaataagacaaattaacatattggaattgtccatattatatttcactttctttctttagttcagtccataactaaggagtaaactatatcatttcacaaaaaatatcgtctcttcattccattagagtcgggaagaagtggaaaaaggaatattcatctacaatatttacaaaaggagtgtcaccaaacatactttatctgacacactttaaaagtttactgaaatttcttaaaaaatatgaaattatcagtgaagaagttcattgaattaaatgtgtaatacttatataatttgatatttttaatgttagtcaataataaaatatgtatttgaaatattatgttgaaaaatattttgtgagcaccaagagtatttctataccactagcaaacataagtaaattaataaatgtttctaaaaccaatatagcaagtagttctgtacatacaaaagaatttaatatgaaaaggatcaatatcattatatgttgcaggcatatagatatcccataagaaaaataaataaaatcccacgtcttgaaggattgttttcattctatttgttcatttgaaatcaatgaaaaaaaaattaataacaaaagaaacgaaaaggataacattttgtttgataaactgtaaaaatttcgtgttattattttttataaaattttagcaaacataattaaattaagaatataattgtaagtcattataaaaaaattacatcgttgactaatacaaaattatcattagattaatttttaaaattataattataaaagttaataattttatcttacttaattatttataattagataataatgtaaaaaaaaattatactatcattacatacacaaattattcttagataatggtgtcttatttaacagctaaatggtaatattttcaaaatacagaatattgaaataagttttatctcttttaataaagcctttcagtacatacaattaataaggaaataaagtgatgagcatggttgggaccctactatttggactttgtcgatatattttctttttcttttcgctttaacttctgagctttaacaatcacacgaaggactaacaagcacctacgctttaaatgtcttgtatatatattcattttatgtagaagaagatgaaattcgaaaattgtgaaatttagctaaaaatattcattactattgccaagttaatataaaaattattgaccatgcagtatgaatgtacagcattatttatttaatttttctaatacaattttattttatattaatacaaaaactctcacaaaacaacttcttaactactagttaattactacttttatacataaaaaaaaactagttaattactactactacatagcagaaattccttaattcttcgagaattatattccttagtttcacctggtttgcctcagttgtttgccgcaggtttcagtatatccttaattaggaatcgtcgattgtcaaatcgttgttaaataacggcgctatatataattnnnnnnnnnnnnnnnnnnnnnnnnnnnnnnnnnnnnnnnnnnnnnnnnnnnnnnnnnnnnnnnnnnnnnnnnnnnnnnnnnnnnnnnnnnnnnnnnnnnnnnnnnnnnnnnnnnnnnnnnnnnnnnnnnnnnnnnnnnnnnnnnnnnnnnnnnnnnnnnnnnnnnnnnnnnnnnnnnnnnnnnnnnnnnnnnnnnnnnnnnnnnnnnnnnnnnnnnnnnnnnnnnnnnnnnntaaaaagtcaataactttataagtattgtctccacacatatatattatcctataatttacaatttttatatttattattgatattcttaattaactaagtaaaaatatttttttataatttttaagataattattataactattaataaatttattataaataacatttttatatgtgtaagtgcatgtatattatttattgaaatattttattttaatttttcattaaaaatactaaatttattaacatgatatgtgcctcgttagagctgtggtttagtttaatctgataatgagaactgaattgacggcagattccctttactgtgaaaaaaaaatagtatttggaggggtccatatgtgatgaaagagttgtacgaaatctttatggcatcaacccccaacatgagtggcccagtggacaagcccatcaatctaacatgtcggttgatagcacttgcataaacttttgttccttgcatcatcttatgtgtctccattctccattctctgcttccactaacgattaaacctcattgattagggttcaatgatttttcaatgaataaaattaattttaaattcttgattctaacagctcacgtatagtctgttgaatcaaatggattagactcttgatatcataaagaaaattaaaatttgattctttgtgtaaaataaagaaatctaattaattatgcttgttatgttactatatatatcatttttccggtgtggagtaacatcaaaatcaaagtaacaaagttacttgcctgttactctaaccataatttcagctaagtcgaatatggtttcatgttttgtaaaacaatttagatcccctttatcaaagtgtatctgccttttacacaagttttttcactttattttatttctcccagaatcaattgttgtgttattcatactattaaattagtctgataactatcatgtcgatcattgttagttttatttccaccattgttgggagtacgtatatactattactttatgattaaacgtgttacttaaattgcagataaaaactctttataatgaagtacaattgtttataactacaacaattatattgagtcaatttaacactcatcaaaggcagaaaaactttactttaagattagacagaggctcataccaatcatggcggtggttataattacacacatcagcaactgtaaaagatcttgcacagccacagaaaaaaaaatgcttgatgcacatctgataaactcactcaaggtctatgcccaaatgtagattcaaagttcaaacattttgggcctatagctagaccatccctcctagtcatagccatctgaattggatcgaccccacccgaaggtttgtgttgcatcacttgcatgcattcacccaccacagttgttgttatagttttctcgtgatttttgtatttgaaaatactatggacaaatataattgatacagtcataattaattattgtcatgttgcaattacaaagactcctcaaagaaaatgtttagtaaatcatgatcaagtagaaattgcaatggcaaactgttttttaaaatcttattagtcagttgtataaacccaaatttagttatatccaggtatgtaatatttgccattttagtgctctgtttggaaatttgcgtgtcgaattgttttttttatacgtacctacacaacactctttagccaaataccacttttcatggaggaatctgtcctgaaaggagtatagaaccagaaacaatatgcgtggtggtatctatcattctgaaaaagagaaaaaatgggatacgtacaatagtaggactgtgacactactagaaaaatgtatgcacctttcatgtccctaaatttatgaacaaaagattcacgtgtcgtttattgaatttgttttatgtggagtgtaaagtcatatccaatactaataagtgtatgtttatataattctttttaaaataattactcttctttatttacatctaataaaaatgttataacattaatttttaaaataagttaaatgaagcatgtttcataagaaattaacttttactgtaattgttacattttttagtaacaaagggagatgggtgaagacggtgaaggaaaaaaaaatgaagataatgtctatgttgttcaaataaaagtattaattgtattaaaatagttaatattaaaaaatatattagtaaatataacattgttgtgttggtgcaatttattgtgcatcaaaatatgtaaaaataataattaacttgtaatttgtatagttggtatgggttgttttatctatcctggattttgttgtatcacacacataatcatttatatatatatgggttactattgtcactaccaaaaatgctattgagactaccaaagcatttgaaattacttggttatccttagttccatttccccacacctcctatccttcccctctttacgttcagctactctccctctttacatccaaaaacagaatttaaataaggctctcaaatttgaaaaaaaaaaagaagatagcaatgactacaaatttatcaagctgccaatacaatgataaaacttcggagtattctaagcaacactaaacagtgatactacctaagcgaaaagattgaagtttgaaccacacatgatcaaggaaatgaaaataggcataccgccatgatctacaaatcagcaaaggagcaatcactatccagaatcccacaataaatccaattgtcatactgacaaaaaaccaattcactccatgcccattacttccttcataactatgggttttcccattggagctgcagtttatgggcagtggtggaccacatagattgttgccgatgaagctggaggcatcaaaggtttgcaattgagttcctgttggaatatttcccttcaaatgattgtaagacaagtctagcatgctcagaaagctcaaatttgcaatggttggagggattttaccagaaagttgattcctcgaaaaatcaatggactgtaatgatctcatattacctataccttgtggaatatgaccaatcaattggttgtgggacatgtttaaaaaattcaatccatttagatatgtgatttctcttggtatttcccctaataacttgttacttgacagatcaatgcttgttaccaaacccagaatgtttctgtactcatctcctcttcctttcagccatagtagcacactaactatactttccatcgaagagtaagacgtaccatattgtgcttcagaatagatacgaggatctgtactttggttctttagtgtcatggcactcaagttactgaaacagctcggtatattgccagacagattgttttgtgcaaggtctaaaacctgaagatgactcatctgacatatttcatttggaatgtggccggcaaaactgtttgatcgaaggcggaggattttcacatttaagaggttttctccaacccatgttggaatagttcctgaaagattattttccccaaggtccaaggatatcaattggttattcttcttcaaactggttggaaatattcctgagagtgtgttgttacgaatttgtaaagactgcagctctgccaaggaacccatggattggggtaagttcccaacaaaatggttgctttgtaaatttacatccaccagaagtgtccaattcatccagcaatcaggtatctctcctgacaaattatttgatgcaagattcagaaattctaaatgcgttggctgttcctgatcgttacataaaaagtcattcatggattcagagaatgaattgcttgaaagatctaactgaatcacatcacttgaaagatagggtaatttaccacacaagtgatttgagcttagatcaatagttgggatagatattggattctttaatgtagtcccaatctcaccatggatatgattacgagagaggtttaaatacgaaacctgagaaagtgcttcccacatctgtgtgggaatagaaccgaaaatccccgtgttagatagtccaacatattgaagttggttttttgactgaatccacaatggaaagctgggacctaactgccatgatgtcacttccaaataggtaagttgaaaattaggaatccaattgggacccacttttaaagttaaattgttccccgatgcgacaaactccgtcaagcttgtaagatttgcaagatcatcttccttgacaactccgtgaaaaagattgccgtcaatatgaagagataacaatttagagagtgatcgaagactttcaaatggatttccactgaatttattcatagagagatcgagatatcttaatgatgaaagttttccaaatgatctaggaagagcaccaccaattgagttgttgtaaaaatctagccgctcaacatttttaaatgccccaatatgatctgtcagattgcctgaaagtcgtgaactctgaactgcaagtcttgtgagtccatgggaaatacaaggagcaagaatttctaaaagttcattaacctgttggttgagtttgagatatgataaatctatcacccttaagttgcagagataatcaggcgcgagcatggacgggacaagttgactatatgacaaattaagtacaacaagagaagtcaaattacccaaagaagttggaatgtttccttcaagttgattgtatgacaaaagaagttcaacaagagaagtcagatttcccaaagaagttggaatggttccttcaagttgattacctgataaatcaagttcaacaagagaagtcaaatttcccagggcatcagaaatagttccatgtaagttgttgtccattaggttcaggaacttgagacgatgaagaccgtataagcaatcaggtatagaagatgagaatgaatttccagacaagtcaagattttgaagaagtgtgaggtttcgaataccaccaggaatcggaccttggatttcattaccccataattgaagagaaacaagtatcttcaatttgaatatccacttggggacaaaagaaatggcaggggaataactagtacgggaaagatcgagaatttgcagagatgagaagttgagcaaggatggttcattatagtcagggagtttgcatcctgacaaatataggtgggtcaaagaaggaagagattggagagtgtgtagccaatgaaatgctttggataggtttgcattactcaaatcaagatattcaagcttccacatacttgatagccattctacattttcagcaaacagaggttcgacaacagaatgacctccaaggccaagatacaccaaattggagagattcccaatctgagatggaattgttccatcggcatacgtcaggtcaagatacaccaaattggagagattccaaatctgagatggaatcttccccatgaatccagtaccagagaggtcgaggtgagtcaaggaagtcattgtcccaaggaaagaaggaattgacataccttctccaaggattcattgccgctcaagtccaagtaattcaaatgctttaaatcagccaaacaaggacttatctctccaccaaagctccatctccgataagcttcccaatttgcataatcagaatctgaagtgttgaggtgaagctgaagaacgtgggaagtaaggttgtggcagaggactccataccagtggcaacagttggtattattatgattccaagaccaaagcctatttgaaggatcattcagattattcttaaacttcaaaagtgtctcacgctcacttgggatgcacacactctctctgcatggtaagctcaacaaccaaagctggacaaagacaagaatataaatggaggaattcatgatcacacaagaatatatagaaaacaagtgtagttgttggttctgcatataaatcatcaaacttctattatttatactgctgccctgcctgtttttttcttcactttcattattttttaccttttttattattgtgccaaatactaaattattcttccattctttttttacgctggcctctttaaattatcgatttaattatccaattctcccgaattaattcttagaatacgaaattttttgtatttactgtatctatctccctttttaaaattcctatatacactaaattcataaaaaaatcaaaattaataacaaaaaaatatgatttattcttgtgctgaatactaacataagaaacattcttttaggtacagttttttttacaaaaataaataagaattattttattttaatttactctataatactgcttaaatgaaaatttggtgtcattaaacttaaattttaactattatttaatcaatccttccgttaaacttttgttacgtacaaaagtccaacatttttttaagaaaaaaatcaagtctttatttcatcaatttaatattaaattatcaaattttcaatattcaaactaaaaataatgtaaaagaaaattgtcttctaaatcatagcttacaccatcaagtcaatctcaaggttttccattttttcatcttgaacctttggacactccacaaagtccagccatgatgttaaggtctgacttcttcaacttgaaccataggtcactgcattaccttcatatcaagttccctgtcattgacaacaaatgttgcgagttaagtcaagcaaggaaaaaaaaatattattgatgaataaaccaattataggaaaagagtttactttaaagactattttggttaaaaaaatctataaaaaaaattatttcattccaagctagctatttaattttgatcaatttttcaattcacaaaataatattcttcttatatgtgaaaaagactaataaatcttcattgtcattaatgattgttgtgttgtctatttctaattgtttttttaatcataatattattttctttttattaaaaattaattagtgagatacaaagaagtttaacttgatctatcataattattgagatcatagtttttccttttataagtcttggtccaaatttctccatgtattgtagatcatatttaacttaaaaagtaaattagaagatctacaaagaagtgtgacatgttttttaaattataaaattatggtcctagctatttattgttagaccacaagtttacatatattaaattttttgtctaaatttcatttatggtgatagtttaagaatagtgatagaagacaaaaataaatattcaatttattgaaatatctaactcaattaattgatgaatacatcaattataggaaaagggtgtactttaaagactatttctattaaaaaatctataaaaaaaattatttccttccaatctaattatttaattttaatcaatttttcagttcacaaaataatattctcttatataggaaaaaaagactagatttaattatcattaattggaaaagttattgtgtcatctatttataattgtattctaacttgaatattattttatttatcatataaaaattaattagttatataaaagaagtaaaaagaatattaacttttttctcaaattttaactatcattcaaatcaatcctttcgttagacctgtacgtgttaagtaaacaacaaaaagttttgtcttataaaattcaaacattctattacatgcggtttgaacccataattaattttaaatatcaaattttaattattcaaaataaaagaaatgaaaacaaaattgtctcctagagaaaccgttggccactccaccaaatccatatcaaggtccccacttttccaacttgaaccatagactactccatcaagtctatgtcaaggtcctccattttaaggtctccacttttccaacttgaaccatagactacttcaaccttaggacactccacaaagtccacccatattaaggtctctgccttcttcaacttctgcaacgcatatatagaaaacaacttaattgtataagtgcttcttgcttctgcatataaatcataaaacttctattatttatactgctgcaagtgtctttcttgacttttttatttttttttatgtttcctttttttaattattgactttattatccaattctcccgagttaattcttagaataggaaataattttgaatttactttatctatctccctttttaaaattcctatatacacaaaattttatattgaatttaactattatttaatctatcctttcgttaatcttttgttaattaaacaataaaagtccaacattttattaaaaaaattcaagtcttctatttcatggactccatcaagtcttttattaaaagtccaacttttgttaattcaagtcttttacaaaattttgttaattcaacttttgttaattattacaaaatttggtattgaatttaactattatttaattcaagccttttattaaaagttcaacttttgttaatttaaatattattttgttaattaaaccatagccgactccatcaagtctatctcaaggtcctgtattttttcatcttgaacctttggacactccacaaagtccagccatgttatggtctctggcttcaacttgaaccatagcccatagggcacaaacaatatattaatgataaatacatcaattataggaaaatggtctaatttaaagactatttcagttaaaaaatctatataaaaaaagattatttcattcatatcttgctatttaattttgatcaattttttaattcacaaaataatattctcttatatatgaaaaaagactagatttaatcgtcatttggaatggttgttgtgtgatctatatgataacttaaataatctactaagaaatataatttattcttatggagatcgaatactaaaataaaaaaatattttagatcacaatataaaattgtttaaatcaatgaaatttcattttaagaaaatattaaacatttttttaatactttaaatcaaaggtaattaaatttggtttaattagtcttcaaattttaactattatttaaatcagtcctttcgttacacctttgttaagtaaatgatagcatagcaagcaaggaggtgcaaggagtaacaccctcacaaagataaagacctctaagccatcattttttttttccttttcttttctatgaactgtcatttcttatgtctacatgtgaatgtcatgcagacaaatgatgtccaagctccactttttccattcattgcaagttgtaagcagaatgtagaatgtacgtataataaaataatgagaatgccaactactagtacgtagtacttaattaaaacaaaagtatcaaaattagaacgaaaataactttgatgctgttaatacatgagtttaattttgatacacagtgtaaaaatttaaattgttaattaattagaaatcacctaatgatttgtaaaacaattactaaaaaaagtttcatttgaaacttagtcttccacccgtctcaagctctccacatgaaaactaagctctagacaaaaataaataaataaataaataaccacgagaaataatatataactcttaagtggacagttcttttgtgcattcagttgaaggaagttcccagaatggtagaaagcaagggacagatgaaacggccacagctaagaatagtgcatcttatatcgggaagagattgttagaaagtttggttacagttgcagggcttctaatttggctttcatgagcttaactcaaatattgcctatatatatatatattaccaatttggctttcacaaaataatattctcttatatatgaaaaaaaagactaaatttaattttgaacttgtaatgttttttgtttccctcacagaacaagtgatgtgactcttgatcgacgccatacgtacgcctactttgatgctcttttttcacaccacttttatcttaatggtatctcaagttgacaatcataaattaaaatagctaactatagttgattagtagagacaaacagctcaaagataaagatctttaagccatcatttttttttccttttcttttctatgaactgtcatttcttatctctacatggaatgtctagaagttgaaaattacttgagctttctttacctactgctttccattttggcgtactgcttttctttctcataatggactttccacttccaatgatggttgaacattaataattcttcatctattttgtctaaaaatttccactcactttttgtgagtggtgtgaatgtcatgcagacaaatgatgtccaagctccactttttccattcattgcaagttgtaagcagaatgtagaatgtacgtataataaaataatgagaatggcaactgctagtactacttaattagaacaaaagtatcaaaattaaaacgaaaataactttgatgcagttaatatatgagtttaattttgatagatagtgtaaaaatttaaattgttaattaattagaaatcaccaaatgatttgtaaaacaattactaaaaaagttataggaaatatatataattaattaattgcaaatgaaagtgtatttaaattaaattcttaattaacatatccttattgtgatattttgtatattttttatttaattgagacagtggaatgagaccgcactataattttcagcacgggtgtggttgtcaaatataatagggatggttggtgaggaattttggaatgttagttggttttagactatatatcctctttattagaaaacaaacgcaaaatttgagtatttattaagaataaaaacatatttaatttcatttagtgtttaatagtgttttggtctatgtttttttgtctaatagtaggtgtggttgtgtaggtgtgtttttttgttgagaaaatctttatataattatgagctatgataaaatcaaaaatccatgatgagttccgtatttaaaaatcgttgtagaattatagggttgattaaaatgaaacgtatttgtcattgagtgcatattaaaatgaaacgtacatgcattacaataaataaaacatttaaactttaattttaatatagaatttttctaaattgttatggtgcatgattaaactttaatcatggagtacacattttttccttatataagtaacatggttttacgtgatttgtttattatttatcttttcttctagttgtgttcattgttgtttgaaaattttctttaatattttgttgtttggacaatcacttagttacaccgtatgaaattcacggattggtttggaggcttgactatcaaatttcatctcgcatcagattaaacatcgcattactataccatatagttatatgtgattttttcccattcaattttatatttagctacacattaaaattaatttataccaaattttttgcatataggttttttttagtgaatcaaattcttttttaattcaaattgggacattagttttcgtatccgttaagaataattgatacctaatttaaataattgtattaaattctaattataaaaaaatcccgtatttattatcataaaaatatttaacaatttaatcattaatttcgtagtataattgatactggacaactaatatttattgcacttaatttcatttgataataactgatatttcttcaatcgcgtatcatttgttgcaaaacgaacatccaatatcattggagaacaatgttgatgtaacgattaattcattgataatcacatgaatgtattaaatccaggatattaaatttacaaataattttttgtttttcaattatattttaacaataattaagaaataaatctaaatccttctacatttacatttgtttataggtatttgggatattggccggagatgctatatgggaatctaaattttgcttaacacaaatgtggtatgcaaggaaaaatcaaattgaaatatttttaaccaccacttcaaatttttaaaagatttgtttcaaaataaggatatgaagaacaaattgtttttagagaacatttcctccatgatgttttcctttcctttaggtgaaaaaaaaatagacatttccaaaaataatgaaagtgcatttatataatgttgtttatatagagaagtctttgaaaatataagtcaagtactattactacaaactattctgtatcatatatctcttatatattttgatataaaatatttattattttttttaatttcttagtaacatgtgcatgaaagtcaaatcaaaccgaatctgaggatttatgtggcatttaacttttatcaatttttgccctcaaagatcacactctaatcaagtaaaatagagacaaatttaaaagacaatgactaaattaaatatggatttggctattgccatattaacctcggagaggtaaaagatcattaataagtaataactttaataatagtaatagaaacagtagacttgtaagcataaagttgttcctaggaaaacaataagccacaaagaaatccccaagaatgtattcattcctaatccacaaagaaaagcccgtatgcgcttactgtgttgtcaatcccagagggctttccatgaatgatcttctccaaggaattttctataacaaaccaaagaactaaatataacaagctctcaacattactgaaatattctcaaaggaaagatctcaaagggatggcaagcctagtttttttttttttttttatcatagaaacattatagtttctccctagcaagaataatttgtgatggattgaaatttcctatatgtatctatgaacctgtggcataaagtttgtttttaagcacacatgacatgacatgataatacctagctttggattaccatgtgacaaaaaattactttcctaactttagtttccccgaaaggtaaaattaaccaaatctgaaaagcgtttcgtgtaatattggctacgcatgactaattaacttctgaaacggtcagctacttcataaccttttgatgccattctccccaacaaaaaacaacttgttacctagcaacagcttgcttgcttgctttctcacgcacttagtgaccctctatgcttgtgaaataaattgttataacctttattgtttttcatcaatattaccaaaatttccttaaaatgttcaatatttcgtaatcttcataattaattcaaaattctcaaaagatcagtatatgaccttttttcttgtttgtactaggagaggaataaatgaaaaaaaaatcagaaatttgtggattgctatttgctcaaatgatgggtctattagttctttgaaatttgtattgatcatatttatttttaccttttaatagatatattgtgctgtcatcccaagagaaggatcaaacattgatgatgcagaggtgctaagatattgcaagaagaatcttgcatctttcaaagtccctaaaaaggtcttcattactgattctttgcccaagactgccaccggaaagattttgcgtcgtcttgcggcacaacactttgtctctcaaatttgagcaacccaagtcctacttttgaagcctccatacctggccatacatagttggagtccatacacataaatttcaacaataatttggcaaacatggcatttaagaggagggtaattctgcaaatggtctttcattcaggatacaatagattgtagttttcaatgattcacgtgaaaggtctaacccatacacatcatttgaaagatagggtaatttaccacataagtgatttgtgcttagatcaacagttgggatagatattggattttttaatgtagtcacaagctcaccatggatatgattatgagagtggtttaaatacaaaacctgagattgtgcttcccacatctgtgtaggaatagaatcaataatccctgtgttagacatgcctaaatatttaagttttttttgtgactgaatccacgatggaaagctgggacctaactgccatgatcccacatccaaataggtaagctgaaaactaggaagccaattggaaccaacttttaaagtgaaattgttccctgatgcatgaaactccttcaagctcttaagatttgcaagatcatcttccttgacaactccttgaaaattattgccatcaatacgcagagatgacaatttagagagtagtgatccaatactttcaaatggatttccactgaatttattaatagacagatagagatatcttaatgatgaaagttttacaaatgatcttggaagagcaccaccaattaagttgttggaaaaatctagcatgtcaatatttttaaaagccccaatttgatctgtcagattgcctgaaagttgtgaactccgaactgcaagtgttgtgagtccatgggaaatacaaggagcaagaatttctaaaagttcattaacctgttggttgagtttgagatatgataaacctatctcccttaagttgcagagattagccaaagaagttggaatggttccttcaagtagattatatgacaaatcaagttcaacaagagaagtcaaatttcccagggcatcagaaatagtcccatgtaagttgttgtccattaggttcaggaacttgagacgatgaagaccgtataagcaatcaggtatagaagatgagaatgaattgaaagacaagtcaagattttgaagaagtgtgaggtttcgaataccaccaggaatcggaccttggatttcattaccccataattgaagagaaacaagtttattcaatttgagtatccacttggggacaaaagaaatggcaggggaataactagtacgggaaagatcgagaatttgcagagatgagaagttgagcaaggatggttcattatagtgagggagtgtgcatcctgacaaatataggtgggtcaaagaaggaagaaattggagagtgtgtagccaatgaaatgctttggataggtttgcatttcttaaacttcatgcacacactctctctgcaaggtaacctaaacaaccagagctccacaagcacaacaatataaataatggaggaggaattcatgttcatgcaacgcatatatgaatcaacttaattgtataagtgcttcttgtttctgcatattaaacttacttctttctattatttatactgccgcaaccgcctttctttcttcattcttgtttcttttttatttcacaaaatgatatttttcttatatatgaaaaagggctagttttcatcgtcataatttgaaataggttgttgtgtcgtctattaatttctaattgtatttgaatatggaaattgttctctttttaatataaaaattaattagtgagatacaaagaagtgtgaaatataatgcttgtttaacttggtctaccataattacagagatcataattttttcttttataagtcttgcttcaaacttctccatgtatcgtagctattttattgttagactaataatgcgtatatagaatataccatagaagggtttgcatttaaaattttattccactaatggtggtggttgcagaatgcacagatatgtagaggtatatatgtctacaacgagccatttaggattaaaagtgtctaatcacaccaccattattttgcactagtttattttattttggtttaactacccttttatagttgtgataatttttctttttagtccctgtagttttaaacatttattttggttcctatatttataatttttttaccttttggtcctcagcaggaagtttcaactcacataaacatgaacaaaattaataaaaatagggaagcaagctcaggcacaactgaaatgcaatggaggtatgagactaagccactacacattccattattcttgagtctgccaccgacccctgcaagcttagcatttgccaattgccatgatgtaatctccttcttcattgtctctcatcaagttggagtggtatcatagcattgaactaagttgatcgttctaatggtagtatgtgccttcatggttgggatgatgttgcaggttccggtttgttgttgagggaaaagatgatcagccacgtcttgtgtgtgcataagagagtgtctttgccctctccacaaccttagtttcaacaattgacgttagtcgaaacttgatggtgagaatcaaaagagtaaaaaaaaaatgtgtttaattcataatatatattcgaccatttgatctttgacaaattttttctttaaaaaaaatctttaatatttaaaattttttattttaaatctccatcgttaaataatgacgtaccttcaatatttatttgaaacttgtcttccaccccgtctccctcaagctctccacattcacacacatatgaacactaagctctagacaaaaataaataaataaataaccacgagaaataatatataactctttagtggaataaataaataaacactaagctctccacattcacacacatgaaatgatccagactaagttaacaaactaatggtcttcttccgtgagttcacaatgaaaccacagagtttattttcatccactagtttccttcccaaatgttttctaaaacataacacactacagaaccttctaataatttttattttttatttttaaaaaaaaccaacattttacatgtagcaccacaacttaacaatttctagctacaaccctgctctgtatactcattctaaacttgttccatagactataatataatctatctccactcattcattcatcaagattgaaaaatggattcaaatgcttgtctaccacacttgctagtgtttgcaataacattggtattggttagtcatgcaatgggagattcagctcaagacaaacagagatgtgcagaatccttgacaggtgttgcaacgtgtctgccatatttgggtggtgacacgaaagcacgcacagcagattgttgcagtggtctcacacaagccatgaagaccaacaagaagtgtgtctgcgttattctcaaagacagggatgatcctgatcttggcttaaagattaacatgacaattgctgctggtctcccttctctttgcaaaacacctgataatttctcacagtgttctggtatgttcaatttcaaaatatttcagttttggaatttatttttacattgacttttgagtttcaatggtgtagtactaaattttgcatttatttttaatgtgttcttttgtgcattctgatacgtgatgcaggggggaattctggtttcgaggaccagggcctccaaaaggggtaaaggaaaggaaataactaagaaaagataattctcatatatattcccctttctgtgaatcattacatttatttatactgattcttataacagaattgctattctatggaatgttcaggattcaagtttgttacaattatctcccacgtgttgtaattgctctaacagaatgcatatatgcctttaataccatcccgcccctttcagatgtaatctttgaggtacgttggtctctctacccttctcttgggcctctgctctttgttttctgaaattgcttgttgcaccttatcctgctggttgttaatctgcattgcttgttgcacctcattctgttgattgtctccctctgctatgtttccccctgtatcacccctgggcccttgggaaagcaccttgtcctcaaggtgataatcccggcataaggttgaccaatcctcccaggaagtctcatcaggggagagcccatgccattgaacaaggacgtcccacccagaaacagatgatggtcgagaagcaaggatcgcagcgggttggacaagggggtgatcgtcatgaaaagaaatcggcagtggattagcaacagggtcgttaggatcacccttgaatggttttaacatggagacatggaagatgggatgtatcttagcatcaggtggtaactgtaatcgataggcaaccttgccaatggcctcgagaacctgaaatggcccatagtaacgttttgccaactttcccgagatggtgggattttcccgggcagacgtttgacggtgagggcgcaggcgaagtaagacccattgtcccggcgagaaaactacatcacggcggtgtttgtcagctttctccttcattaaaatctgggcctttagtaatttcttacgaatcatgaggaaggtttcctcccggtcacaaagcagggtatctacagcatcaatgttagagtcaccggcaaggtactccgggaagttaaatggcttccggccaaaggtgacctcatatggagtggccccggtcgcggagttccaggaagtgttgtgcgaccactccgcccatggaaggagacggccccaaatacgagggcgccgatgaacgaacgagcgtaagtattgctcgataatacgattaataacctcagtctgcccatcactctgggggtgatacgcagaactcatacgcaagtgagtgccactgcgccggaaaagctcctgccaaaacttgctaagaaacagagggtctcgatcggagaccaagctccggggaacaccatgaattttgaccaccatgtccaggaataatgtggccaccatgaaagcagtgtgcgcagtaggaagcatccccagatgaacccctttagaaaaacgatccacgaccaccaatatgattgtgtgacctttgtacggcggcagcccaacaataaaatctaaggacaggtcctcccatggacgatgaggaaccgggagagggcaaagaagaccagcgagcttctttgtttcgtatttagtggactgacagtcacggcagttggccacaaaggtcgcgacatcctcacgcaaaccagaccaatagaagttctcagaaacacgagcaatcgtcttggcaatgccagagtggcccctagtgggggtcgcatgaaattcaatgaggagggtaggaataataggaatatcacgtggtaaccatatgcggtgacggtgcaaaataagattgttaaccacagagaacccagggtgtttggcgggatgattagcaatgtcctgtcgacgatgcacatagtcagaatgttggtcgagctgagaacggagttcgtccatgaaggtcaagcatggaaccgaaagcatgagagcaagggaagaatcagggtctggaacacgggagagagcatcagcagcctgattgctagcaccggaccgataatggatttcgtaatcgtagcccatgagcctggcgagatacatgtgctgctcgggtgtctggaccacctgggtgagaagctccttcaagctccggtggtcggtcagaatgacaaaacggtgtccgagcaaatattgcctccattttttgacggcggccgtaatagcgtacaattcacggacatacgttgatgatcggagcattttggcactaaagggtttactgaaataggcaatggggtgtcccttctgagagagcacagcacccaagcccaccccagaggcgtcagtctcaatggtgaagggaaggtgaaaatccgggagagctaacaccggtgcggaggatagagcgagcttcaattggtcaaatgcagcctgagtaacatcagtccattgaaagggatccaatgtggtagctttgaccaagggggcagcaatcgtagcatagcccttgatgaatcttctgtaaaacccagctaatccgaggaagctacgaagagctttggtggtgcgcggggaaggccattgacggacagcttcaatcttgtcggtaagaggttccacgccattgaaggagaccaagtggcctaagtactcgacctgtctctgtgcaaaggtacacttagaaagttttaaggcaaattgatgtgtcagtagtaccttgaaggtgatttccaggtgttgcagatgagcatccatggaagtgctataaatgagaatatcgtcgaagaagacgataatgaaacgccgcaagtaaggctgaaaaatcgaattcatggttgcctggaacgatgatggagcattacataaaccaaatggcattactttgaattcgtaatggccatggtgagtacgaaatgcagttttcggaatgtcctcaggattcatacgaatctgatggtaaccttggagcaaatccaacttggaaaaataacaggcgccgcctaattcgtcaaggagctcatcaatcgttggaattggaaaacgatcccgtatggtaagcgcattcaaggctctgtagtcgacgcagaaccgccaagagccgtcgtgtttcttaaccaggaggaccggagaagaaaacggactggtgctgggctgaatgagacctttctgtagcatagcatcaacctgttgctcgatttcttgtttctgatagtgggggtagcgatacggtcgaacgttgaccggagttgcctgagggatcaagtggatgtggtggtcggtagctcgagccggcggtagggtagaaggagtggtgaagagagcctcgaatcggagcagcaagtcctgaattggggcagggaactcctgtggcagggaaggggtcgaattagatagcaaggtaatgtgataaaacagagcatcaccttgtgttcgactgagccgacgaagctggaccggagtgaggaggtgaagtttggcatctaagtcaccctgtagcttaatgatgcggccgtctgaaaaaaattgcatcgaaagtgtgttgtaatcggtaagcacgggtcccaaggcttttaaccattggaccccaagtactacgttagctccggatatgggaaggatatacaaatccactataaatgtattgttctgaatgttgatggcaatagcttggcacatgcaactacaactcaattgttgcccatttccgaccataacgcgcaacggggtggtggaaatggagggaaggcccaacttctcgaccagctgttgctgaatgaagttgtgggtgctccctccgtccaccaggagcaccacttcaacgtcagcaatggaagccacgaaacgcagcgtttcgggcgctaagtgaccggccatggagtttaaactaagttgggccggatgcgggtcatgggcttcagttgggtcagggtcgggttcgagggtcgggtcaagtggggctatatgtggtgggtcaggagcagcgtcaccttccgcgatgaagagaaataccctagaggcacagcggtgacctctgtggtacttctcatcgcagctaaagcaaaggccgcgctcacggcggctggcaatctcttcagaggtcaggcgtttgaaaggttgggtgggggaaggttgaggaggtggcggtcgtatggctgacggtgaaggaaaaaggggtgaaaggggttgcgggcgtggtgagaaggaggaagaagaaagtgagggagggcgagaacgcatggtggacggtggtggtcgaaggtcacccagcttttcctcctggaggcgcgcgaggccggccgcctgtgaaagagtgaggggttggtgggcctgaacctcacggcggatctcaggagtcagcccggaaatgaagcagctgaggaggaaggccggcggaattcccacgacacgatttgctaaatcctcaaactcagagaggtaagaagccactgatcccttttgcatgagtttgcaaagagtacccgtagggtcctcatattgtgatggtgcaaatcgattttgtaatgcttgaaggaaaacaggccacgaagtgaattgaccattactggtcatccactgaaaccatgctaaggcccttccttccatataaaatgacgcaatcgttaatcggtcgtactccggggtcccatgatactcgaagtactggttgatcttaaagatccaaccaagggcgtccgttccatcaaaacgtggaacatctaatttgaggcgatggtgttgtgcaggaacaggaaaagggcgtggaagggatgaaggcatgtgggaagcaggggaaaaaagaggggtaatgtgagagatgaagtcatcgattttgctggagagagtaagttgctgtgtggtgaggcgaacgaggagttcttcaattttatcagaggacgaagggtgcgtcattggagggcaacgagagcaccaatgatacgtgatgcaggggggaattctggtttcgaggaccagggcctccaaaaggggtaaaggaaaggaaataactaagaaaagataattctcatattcattcccctttctgtgaatcattacatttatttatactgattcttataacagaattgctattctatggaatgttcaggattcaagtttgttacaattatctcccacgtgttgtaattgctctaacagaatgcatatatgcctttaataccatcccgcccctttcagatgtaatctttgaggtacgttggtctctctacccttctcttgggcctctgctctttgttttctgaaattgcttgttgcaccttatcctgctggttgttaatctgcattgcttgttgcacctcattctgttgattgtctccctctgctatgtttccccctgtatcaattcagttgaaggaagttcccagaatggtagaaaccaggggacagatgaaacggccacagctaagaagaatagtgcgtcttatatcgggaagagattgttagaaagtttggttgcagttgcaggcttctaatttggctttcatgagcttaactcaaatactacctatatattaccattttcatatcacgttgaaatgtaaaccattgattagttgacagtgtaaaaatatttacactcgagtgtattaaatctctgacagactcacaatagatattattgcaaaaccttattggagatttatttttgtgagcattttgcatttaatctcatacaactaaatgcttgttacacaaatcttattgttcagtcctaaaattcttttatctctaataagaaataacgacttgttgtaatagaagttaaaatctaattattttttttaagtacactacttgaggatgattttggtatcccacttttcaattgctgggttcgtttccatattttcaaattttacaaatttgattcattagttaacttaattgatatcaaattttacattttggtatccatatttacaaaattaacaaactaatttttttttcctcgtaaagtctaaaactgataattcgtcaagcatgatatggtttctttagccaagtacaagataatctagattctacttgtatcctcccaagatattctaagaatgaatgagttaagttgaatatggaaaaacaaatattcattaagatgttatggtttgattatcccaataacttttctcccatgattcaacttgttgaattgagctttcctttctctgtaatgttgcatacaaagttggagggtcaaaaggggcaggcatggtgcaagggtcggtatttgcaggaaccttgaccaatgattccaccataaatttctttactgatccttctgctccacaaaccattgactccacacatagttctgtagcattagcacttatggagggtttgtatctgaagagtttagcatatgaattcaggagatgaaacatgtagtcgtacacgtagagtggtagagtcacatgacagaatgtatttttgactgactgaccaagcagaaccttcaatgtacaccttatatctgcacgatcatgattgaattcaaacatttatttattgataaactgaacatatatatccaataacaaaaatatattattacatataattataactgaagcatgaatggacagttttaatgttatacctataagtgcattgacttggcaagtctgatttgttgaacccctcttgtgattctcgaaaccaatgctgaaacaaaattttcatttgtcaagaaggaagctatatatgcggctttattgtgagtcaattaatagacaaaatatattgtccagaaggaaaaaatcagtaatgttcaataacaggttatttcctttgattttgaatgtacttttaagttgtgtattaataaaagattaaaagttaaaaaagtgtataatgttatatacaatattgctgctggccattgtgttgcttgaatttgcctgttatttctagtttctgcacaccatgtgcttaagccaattttatataatgaaacttttgcttataagaaatattacatacaaaattaattttttcatatccaaataataaaactactttcaataagtgtaatcaaacaaagctaataagaagtgtgatacctgggcaaataaacgagcattccaatcttgattttcataaacattgcatttcatgagatcttgtctggtttcagcaacagctggattacctttccagtaagcataaggctctctgttcagccatggtatcctcgtagtgccttctttcaaccctcccaacaaaatatgccatggctttatattaatctctgccctgtgcaccacacatacaatacttttcaacaacaacaaccacccaattatgaagcaagtgtagagtctaaatccatgggcattataagaatgattagggacttgtgctaactaccccaattaggacaatattctaactatggtggttgtgaattttttttataggacaaagaaattaatggtgcagatggcgtcaacaaattccaatcaggggaagaagaggaagataaggaacagtgcagtccagtatctgttttagacccacccttggatgacgatgatgatgggcatgatgatgaccatgaaggggatggttttgatttggactgtagctatgccaatgtacaaagtatgtcatagtttaaaaatattttattttattttgtagcattttatgttgtgtggtcgtcttccatcaacatgccatcgtacacgcttcttcaaagttgattgtctgttacaaaataccataagctgagatgttttgtgctaatgccacctatctttggtgggttccattggaagattgcaatagctcatcatccaacatgcatttcgcattcaatgtgaaattggactactctttgttcagagctataaatttcaacatgacccacaaattagtgtgaaaacggacaatttcagtttcctgttatatatggcactgtatataaaaaggaaataaaaaaaagtagaatttgattatggctaatttcacccattatatttattacaagaaaacctttagatacaaattattttttttgtacttttagcttggtcgtaaacattaacgttacatcacgcacacacacataaaaggcaaatcaaattattttatatccctaaattttatgaggaaggatgctataaatattaacaatacatctcacacacacaaagacatctaaaattatatcactaagttttatgatgcgttacggtttgctttaaaatatggtacaaggtttatcagagaccggcttataagtaaaaattaaatttgtcataaagggagtaaaatggaaaataattaatttcttaattagaattaaattagaataagctgtgcagatcttataatttttgttcactaattcgcccaccacataatgttttaatatttccaactttgtataatctaaaaagtataaaaatgaagattacgactttcagcctccagttccttttaatggaagaagtgagtaaatgttgatgcgatatcggtagctttcatgggcagtgaccttgtcaaagaatgcttgggcaatgatcattggttatctatggatatctcatcaaagttcttggagagtcaagtcttgtatgcagccacgagtcacgactttaattaacacgaaagaactaattattcacttcaatggttagtgactaaaattaaatataagtttttttcctattaaaccacgttttcttgaaccactagtcccccatttttggaaacaagaatgtgatacacagaattgaacaactagttgatcttaattacaaatatgctcaatatgcaaatatgtacatcccaaaacagaatttaaataagactctcaaatttgaaaaaagaaaagaaagaaagaagatagcaatgactacaatgcaaattgaacaacctggcaatacaatgatacaacatcggttgtaagcaacactaaacagtgatactatacgaggaaaaagattgaagtttgaaccacacatgatcaaggaaatgaaaatagacatgccgccatgatctacaaataagcaaaggagcaatcactatccaatatattaatgataaatacatcaattataggaaaagggtctaatttaaagactatttcagttaaaaaatatataaaaaagattatttcgttcatatctttctatttaattttgatcaattttttaattcacaaaataatattctcttatgtatgaaaaaagactagatttaatcgtcattaattggaatgattgttgtgtgatctatttctaattgtatttgaacatgaatattattttctttatcatataaaaattatttagtgatataaaaagaagtttgaaaaagaatattaactttttttctaaaaaaaaaattagtagaatattttgtattttttacacgtcatcaacttaaataataggagaaacataattttaattttcattgtaatttttaaataattttaattgccaaatttaagcaatcataaaattactcatgttcaatataatattctcaaaaaaaaatacatatgataacttaaataatctactaagaaatattttagatcacaatatagaattgcttaaatcaatgaaattttattttaagaaaatattaataatttttttaatactttaaatcaaaggtaattaaatttggtttaattagtcttcaaattttaactattatttaaatcaatcctttcgttacacctttgttaagtaaatgatagcatagcaagcaaggaggtgcaagcagtaacactctcacaaagataaagatctgtaagccatcattttttttttccttttcttttctatgaactgtcatttcttatctctacatggaatgtctagaagttgaaaattacttgagctttctttacctatactgctttccattttggcgaactgcttttctttctcataatgaactttccacttccaatgatggttgaacattaataattcttcatctattttgtctaaaaatttccactcactttttgttattggtgttaatgtcatgcagacaaatgatgtccaagctccactttttccattcattgcaagttgtaagcagaatgtagaatgtacgtataataaaataatgagaatggcaactgctagtactacttaattagaacaaaagtatcaaaattaaaacgaaaataactttgatgctgttaatatatgagtttaattttgatagatagtgtaaaaattgaaattattaactaattagaaatcaccaaatgatttgtaaaacaattagtaaaaaagttataggaaatatgtataattagttaattgcaaatgaaagtgtatttaaattaaattcttaattaacatatccttattgtgatattttgtatattttttatttaattgagacagtggaatgagatcgcactataattttcatcacgggtgtggttgtccaatataatagggatggttggtgaggaattttggaatgttagttggttttagactatatatcctcttgttcagttttcacattcttgttggttagtttaaaaatcgagatgatactggataaatctgaagtcgtgtataacactttcagattgaatcaaatttcggggttcaaccaaaattgttcaatcagataaaattagaagataataattcaagagttttgttttggtcttgtatgttttgtcacccgttatgctttctgaaccagaatgattatttatgatcaaagaaaatgtggtttttggcggttgatggaagttatttctttttaaaaattgccgttgatggaagttttagtaacttccatgtaactttcaacatttgcctaaaccgagcatctcgttattacattaaaacaagcgtgcactcttattttaacattaaagagatcaattacactaaaatgtccaacaaacctcccccattttagtgtaattaccgatcaaatcaccaaagtcataacatacaacaaactactgcatagatgaaatatcgtgacgattgaatttcatcttagcaaattacacgtttcaaatattcgaatatcagggtgtcactaaggattgaaccctttctattcataatgaatacatgaagataatctgcacaatagtttataacattactcttgctcgacactagtttactagcctgtgtccctatccttcataagcatatcaaagccaagtcccagcttcttgaagcggctaaacttcgtgcttatataggtagtcattttctttcttgcacctgcaaatgcaatttttcaaaagaaccattgagaagttatacttcaacctccttaactttcagaaccgaacacatatcttttgggatactttcgatgatgtgttccaatctctacatgttaagctttccacattgaattcagcacctaatgtcatattagatgggaattgggtatcttaacataagagatttcaaatggactttaatcctaatcccacagccgaccttttcacgagatctctacttaaccctttggttaaatgatcggccaaattatgctgagttctcacaaactccactgatatcacaccatgcatgattaactcccgaaccatgttgtgtctaacacccaagtgtctagacttcccattatacacttgactatatgccttagccaaagtagcctgactatcacacctgatagacatgggaggtacaggtttgggccacaatggaatctcatagatcagatttcttagccactcagcttctttaccagctgctgctaaagctacaaattcagattccattgttgaatttgtaatgcaggtctatttcttggatgcccaagagatagcacctcctccaaggaggaatacccaaccacttgtggatgaataatcctccatattggttatccaacttgcatcagagtaaccttcaataaccgaaggaaatccagtatatgtcaaaccatagtcaatggttccctttaagtacttgaatactctattcatagcttgccaatgatgagaactaggattacttgtaaacctactaagtttagcaacagcataagctatatcaggcctagtactaatcattgcatacatgagtgatcctatcgcccttgagtattcaagttgagacactgctacacctttattaggtaatagcttcaggttaggatcaatgggagtacttaccgaagaacaatctttaaaattaaatttctccaatatcttctcaatataatgtgattgagagatggaaattccattgtttccacgtttgatctttattcctaagatcacatccgcctcccccatatctttcatatcaaatttagaagacaaaaatgccttagtttcatcaacttgatcttggtcgataccaaagatcaacatgtcatctacatacagacaaatgataactcctttgccatgagtatcaaacttgctgtatagacatttatctgcttggtttataacaaaaccactagacaacacaacctcatcaaatttttgatgccattgcttaggcgcttgtttcaagccataaagagatttcatcagtttacacaccttattttcatttcctggcataacaaacccttcaggttgtttcatgtatatctcttcatccaattcaccatttaagaatgcagttttcacatccatttggtgaatcaccagattgtggatagcagcaagtgctaacaacagtctaatagtggatatcctagcaacaagagcatatgtatcgaaaaaatcaataccctccttttgcctaaagccttggataaccaatctggctttgtacttgtcaacagtaccatccgctttcatctttctcctaaagatcatcttacatcctaatggcttacatccaggaggtaagtcaaccaatttccaggtattattttgcataatggaatccatctcactttggattgcttctttccagaatacagcatcccttgaagccattgcttcactaaaagtctttgggtcttcctcaacattaaggcaatattgatattgaaattcaatatcattccttgacccttcaaccaaatagagttaaaagtcatccccaaatgacttagcctttcttactctcgtactctttctagtttcagtactagttgaaggtatatcctcaatattaactgagactttcgacatggaattcatgtcctttggcctaggtatagatgtaaacctttgttcatcaaagatagcatctcgtgactctataaccgagttcactgcaacagaatcattagattccagcacatagaatctatatgctttagaatgttcagcatatccaataaatatgcaatctatacctctttcacctatggttttccttttaggttctgtaagcctgactacagccctacatccccaaattttgagataactcaaatttggtgtatttttgtgccaaagttcatatggggtaaccttattccttttgttaggaattcggttcaacaagtaacaagctgtcaacatagcctcaccccaaaatccttcacttaaacccgaataggataacatggaatttaccatttctttcaaggttctattcttcctttcggctacaccattctgttgtggtgtatagggagctgtagtttgatgtattattccagtagattgaaaataaaccggatcataatactcacctcccctatctgtacgaagagttttgattagcccattttgatgaagttctacctctttcttataaattttaaatttatcaagagcttcatcttttgtatttaataaatatacataacaataccttgatgcatcatcaataaaagtaacaagatattttttatgacctaatgatggagtagcatgcaaatcacataaatcactatgaataaggtctgagactttagtctcacttttaacatccttaaaaggtttcctagtggtcttggtcaacatgcaagttttgcatttttcaatgttcatatcaaaaggaggaatcacacttgtttttgacatatcttttaatcttttgtaatgaacatgtcctaatctagcatgccaaatttctgattttgttatattagttatagaactacacgaggccatacaaacagattcatgaacaaaaggaacatcaatgtttaatttaaacattccattacaacgataaccaaatccaacaaacgaaccatatcttgacaagatgtacttgtcactttcaagtacttgcttgaaaccacaattatttaaaaccataccagacaataagttcttacgaataccaggtacaaataagacattatccaaatacaaactttttccggaagtaaaaactaaattcacacaacctaatcctaggattggttcagttgcaacattgcccatcttcacaatagagccatcatcgattggtctaaattccttgaaccaacgacgatctttgcacacatggcttgttgctcccgaatcaaaccaccaagcaacgccatcatcctgtacatagaatgcatcaaatattagtgatacataatttgaattcgtattcgaattaaaattattcactacaatctgaccttgttgcttttcaggatcattagacccacttggaccagccttgttctttcctttgaacacccggcaatccctctttaaatgaccaggtttcccacacttccaacatgacaattttgtctgtttgtttggacctttgttcttatttccttgaaattttcgtttgttacctttagcattataattttgcttaactgttccactttcctctaccatattaacggaagaggaacctgctacgtttttatcattgactttgtcaatttcctgagccctcagcgactcctcaatcatgaaatgactaccgagttgaaccagagtcaactcttccttcttatgtttcaaggtatgcttgaagtcttttcaagaagaagacaatttatcaattatagatgaaactgcaatggattcatccattttcaaatcatgttgagtaaactgacccaaaatccacaacaattcattatattgttccataacaggcctcgaatcaatcattttgtaattaaagaaattactaactaagaatttgttacttgaggcatcttctgccatatacttggattcaagagattcccataattccttagcagactcaacattttgataaatatcaaagagagagtcagacataccgttcagaatgtgtccacgataaatgtaatcgttgttctcccatttcgaacgcttccttgtttgatccagagtttcgtcttccatatacatcggcatcggtgtactcagcacatacaccacattcaatgttgtcaagagaaagtgcatcttcttctgccatcttctgaaatcttgcccttcaaacttgtccaacttcgcaaacttgcttgtcatcttcgaactatcgttcgtcatctcgaaaaatttgattcaatcttttgttggttagtttgaaaatcgagatgatactggataaatctgaagtcgtgtataacactttcagattgaatcaaatttcggggttcaaccaaaattgttcaatcggataaaatcagaagattataattcaagagttttgttttggtcttgtatgttttgtcacccgttatgctttctgaaccagaatgattatttatgatcaaagaaaatgtggtttttgacggttgatggaagttatttctttttaaaaattgccgttgatggaagttttagtaacttccatgtaacttccaaccgttgatggaagttttagtaacttccatgtaacttccaacatttgcctaaaccgaacatctcgtttttacattaaaacaagcgtgcactcttattttaacataataaagagatcaattacactaaaatgtccaacaattctcattagagttaagttgcttttggggaagaaccaatgtcttgaaattccctcttcaccagaagcagttttattgtgtctctatcgaagtcatcttctccagggacttgcctttaactttgaagataggaaatagatcagtcaaacattgtttcagtttatttggattttttttgaaggacatgtgatttacaaagacttcttacaactcacaacctttggaatttctctatgcctggttaacccacaatttcggcgcctgttgcggttaggaacataggctagcaaaaacactaatcatttcaagagaaatgttaacacacttttctaatatattatttttttattttaaaatttattaaaataaaaaaattatatgtttatccatgaacactaagctctagacaaaaaaaaaaaaaaaaccacgagaaatagtatataactctttagtggacaattggtgttgtacaaaattgaaatgatccagactaagtcaagaaactggtcttcttcattgaactcacagtgaaaccacagaatttattttcatctactagtttccttcccaattccgatgttttctaaaacataacacactacagaaccttctaataaattaaaacaaaaaaaccaatattttacatgtagcaccacaacctaacaatttctacctacaactttttctatagactataatataatctatctccactcattcattcatcaagattgagaaatggattcaaatgcttgtctaccacacttgctagtgttagcaataacattggtattggttagtcatgcaatgggagattcagctaaagacaaacagagatgtgcagaatccctgacaggtgttgcaacgtgtctgccatatttgggtgctgacgcgaaagcacccacagcagattgttgcagtggtctcacacaagctaaaagtaccaaaaaataactcaaatactacctatatattaccattttcatatcacgttgaaatgtaaaccattgattagttgatagtgtaaaaaatatttacactcttgagtgtactaaatctctgacagactcacaatagatattattgcaaaacctttcggagatttattttttgtttttaatactagcctagagtctacagatcaaagttaattaattgctgaaaattatgttcattctcattcttggcgctgttagtccagtgtgaaaacggaaaaattcagtttcatgttatatatggctctgtatatgaaaaggaaattaaagaaaaagtagaatttgattatggctaatttcacgcattatatttattacaagaaaacctttagataaaaattattttttggtacttttagcttggtcgtaagcattaacattacatcacgcacacaaacataaaaggcaaaccaaattattttacatccctaaattttatgaggaaggatgctataaatattaacaatacatctcacacacacaaagacaactaaaattatatcactaaattgaggtggggatagttttgaaaaaaaaaatagtaggtgtggttgtgtaggtgtgtttttatgtttttcaattcaggatattaaatttacaaataattttatgcttttcaattatattttaacaataattaagaaataaatctaaatcattctacatttgtttataggtacttggcatattggagatgctatatgggaatctaaattttgcttaacacaaatgtggtatatgcaaggaaaaatcaaattgaaaattttttaaccaccacttcaaattttaaaagattcgtttccaaataaggatatgaagaacaaattgtttttacagaacattccctccatgatgttttcctttccttaaagtgttcaatatttcgtaatcttcataattaattcaaaattctcaaaagattagtatatgaccttttttcttgtttgtactaggagaggaataaatgagaaaaattcagaaatttgtggattgcaatttgctcaaatgatgtgtctattagttctttgaaatttgtattggtcatatttatttttaccttttaatagatatattgtgctgtcatcccaagagaaggatcaaacattgatgatgcagaggtgctaagatattgcaagaagaatcttgcatctttcaaagtccctgaaaaggtcttcattactgattctttgcccaagactgccaccggaaagattttgcgtcgtcttgtggcagaacacattgtctctcaaatttgagcaactgatcaagtcctacttttgaagcctccatacctggccatacatagttggagtccacacaccataaatttcaacaataatttggcaacttggcatttaagaggagggtaattctgcaaatggtctttcattcaggatacaatggattgtagttttcaatggttcacgtgaaatgttcacaatgtaatgttttcaatgttttataggtcttaaataccaatagcagacaagatcatgcttatgcttttttgctatcgtgctcctgttccttgccactggtcttgatgaagccaagcattgcctctttgccttttaagttgtacatagttgcaaaacgggtacatgtgaaagaataatgcttattaaaggtaaggttgattttaaagtgggcatgcaagaatgcattcattatctcaagtaaataaaattcaagcgaatatgtgatttggattagagaatagtattatccagtgcacactaaattggagagattcccaacatgtggtttcaaaactaaaagaacttaccaactatttgaattttaatctacgtgatctagctaatgttttctatcagagaattacaactagttgatcttaagtacaaaactatactaaatatgcaaatctttacatctaaaaacagaatttaaataaggctctcaaatttgaagaaaaaaaagaagatagtgttagcccatatttttgatgagctaaaatatgctctaaatacgcattagatgtcgtcttgaatttcgaagcgtattaaagagcaagagtctggtcagatcctgttcgaatcgaaaagaaagaagaggtgattgaaagggattcacgggatcaaagaagtatttataaagtataaggctaagacaagaaagagggcttcgaaccattgggcgattcgaactggtgtatggtcgagtcgaagtcgaggcagcaagagttctggacttagcgcaatttctgacaaaacttcacaaaatcagttcgatttcgagtaatgtggataaccgttctaaggagcagttatatgcatgcaaggtatacgtagcaggacacttggcattaggatagtgttcgaccgttagggcagtttattttcgaatgtctatatatagcagttttttagtcagatttcagggtcgcaaatcattactacaagtccttatatactcaaagtacccagcgcagagagaaacgagtacgcaaggaaaatgtatgattgtgaaccattttaagtttctgtaaactttacatttcgaatgcaatgcaatttatgcttcactttataatttctgtcttttaaatggttcattcgatcgaatgaattcgttgagcctttaattctgcaatttatctttcccttgtcaatttacttccagcatttcgatttttgtcaaacaattttgctttctgcaaatctcaaaccagtgaatgtttgttgcaatgatgaacattaaaggctttacatctaaagcaaacacacaattggcatgctcctgagattcactagttgatctcgcaagcaattaacttagactagcggttgtttaccaaattccagtgtaaacaaattggcacgcccagtgggaccggtcaattgtgtgttttggttttaaattattattaaagttttgtttagtgcagttggtttattgcattcttaattgttttgattttgtatgcatttaagaagtgggaaatctgttccacacttaacagaattcaaaactcgtacaaggatggctagaccacccccaagtaatcgaaacaatgaccttccaaatatggagggacaaccaacgcagacatctgttagtaatgccaatataaattctggcataggagcaattcctgaccaaactgttggcacgataagttcgaccgcttcgacggttatgaatcagacaggggtaacttctcccatgaccaacatgacgttggcaagttcgaccacgtcagcgtctgcttttgccccatggaataaccctagtttagggaatcccagtggaagtccctttcgaccgcctcaaaaccctctatatggcatgcctacatctttgatggcagggttgcaaaactctcaaccaaatatagagaatcttaatatgtcttctccatcaggatctgtagcgggcaatcaaggtagggtaattcctcaacatttaaccaatacatccgttttgtcactcagacaacaaatggatgaaagtaaccatgatatggttaacatgttaacacaacaaataggaactgttattaaccccttaattcaaaatacaaatgacagttaccaaatgttaacaaatcaaataagtcgaattgctgacttttttggggcaccacctatacagcaaccaccaattcgacagatccaaatacaggcgcctgtccaagagatacagatgcctaacaatccagggatgcaaatggctcaagcaccacaaccattggcacgcatagagccaccagcccaacaggtcgaaccaaaccctggtatagtattggtaaataggaaccaaaatgctgatgaagtaatagggaatattcaacaaaaccgtttcgataggcagaataacctggcccaaatggtcgaaacgattttgatgcagaatggtttgaacttaggcttacacaggcctaattttgtgtctccattatctgagtatgtgttacagacagaattaccaaggggtgtgaaaatccctaagtttactaagtttgcaggagagacaaatgagtccactgtcgaacacattgctagatatttggtcgaggcaggggatttggctaataatgaaaatttaagaatgaaatttttccctaattccttgactaaaaatgcttttacatggtttacaaccctccctcctcattccatacataattggaaccaattggaaaggattttccatgagcaattttatatgggacagtctaagatcagccttaaagagttagccagcgttcgacgcaaggcacctgaatcaattgatgattatttgaacagattcagactcttaaaggcaaggtgtttcacccaagtccctgaacatgaattagtcgaaatggctgctggtggcctagactattcgattagaaagaaattagatacccagtatttaagggatatggctcaattggctgatagagttcgacaactcgaacgattgaaggctgaaaaggctagaaattctaaattcctcaagaaggaaaaggttgcatatgtcgaaaccaatgacagtgaccaggagttcgatattatttatgaagatatcgaagacaatgaggttgatttagcagaattaaaacctggacctccttatgtttgtaaactccttagaccttccaatggaaaaaaccctgttgaacctaaaaatgataaatttgtgtctaaaacttatacatttgacataactaaatgtgatgaaatatttgatttattagtcacagatggccagattgttgttcctaagggcttgaaagtacccccaatcgaacaacagaagaaaaggggttcttgtatatttcataatttccttggccataaaacctcacgttgtgttcttttcagggatttggttcaaaaggctctcgacgaagggaggctcaaatttggtgagaaaccaaaggttgttcaggcaaatgctgaaacatccaaagctgctgaaactctctatgcggagccccaagaaataatgatggtcgaaacaatggagttgtcccatgtgcaagttcaggacatatctgaagaggattacaacgaacaaatgaaggttgtgtatcctcaggctgaggaggagttaattgatttcttgaacagatgcaaactcgaaaacaagattgtaatgctctgccctcgctgcagtgcagtatgtgatagggaggctactgagggcctcaagaaataccaagttgttaacaagggggcaaagcagaaccaacgtttcgataaaggcaaaagagttatggtgcagtcgaatactaatcagaagtctggtcgaaggaatactttcgctcctcctggttcagttccggtcgaaaaatggatgcaccagggactcataaggttcaacaaagggatcatggaagtaggtggttcgagtggaacgaagcaagttggcccacaagaggctaataagtactcttataggaacaattacagaggaaagaatcctatgacgaggacccaatggcgtaggttccagcgtcagaagaaattggcccaacagaatccgcaaacgggccagtataaagaagtatctaggaggccagtaaaagagaggctcctgcctccagtggatgaagataagatggaggatgaggatctactggattctgaaccagattttgatgtcatctgtgtggtatctatcttgccatcggaatatgatatccaatctgaagttactgaggtcgaaagtgagttcgatcattttgatatggctgacccaaagccagtatgttactatgttatgaacaatggctgtgtggaagaacaattagcttatttcgaaaagccagattttcagatgaaaagtcatctcaaacctcttttcatcagggcaaaagttgagaatgttggaatcaacaaagtgctcattgatggaggagcggctgtcaacttaatgcctcgatctatgctctacaagatcgggaaacatgacactgatctatctgctcacaacattgtgctttcgaattatgagggtaaaactggctattctttgggagccattcaagtagatgttgctgtaggcagtatagttcgaccaactctattcctggtgatacagtccaaggctaattttaacttgctattaggaagggaatggatccatggagttggggctgtgccatctacccttcaccagaaactcattatctggagggaggatgggattgttgaaaatatggaggcggatcaaagcttctataagtctgaggtcgataatgttactgcacaaacctttgacaaaaagttggctaacatagcaccttgtggtgataaggaggctattgtcgaatcaagtgacaatgttatccactctgtcaaactccatcctacctatgggtttatatgggagagggaggaaattgatgctgttccctctgaagatggagtcattccaccaactgggtggaatatgtatgaagattaatatgactgaggccactgcattggccagaattacggcttatatggccgaaaatagactaaatacggcctttgaggctgaatctcaacaaaatatggcagttgaagccaagatcgaagatcataaaaacaaagaaacaaaggatcgaagactggattgcatttatgacgatgagccgctgggtttcgagaaaaatcccgtaagtgaggtgccaaagatgcaggctcaagatcctttggaggaaatcgacattggagatggcttgatgaaaaggccaacatatatcagtgccaatatcacctcaagtctaaaagaaaagttggtgcttcttcttagagaatttaaagactgttttgcttgggattaccacgaaatgcctgggttaagcagagaaatggtcgaaatgaaattaccaattaaggagggaaaaagaccagtaaaacaactaccaagaagattcgcaccagaaatcatgtccaaaattaaggaagagatcgaaaggctgctgaggtgtaaattcatcagatctgccaggtatgtcgaatggctagcaaatatagtccctgtcattaaaaagaatggaactcttagagtatgcatagattttagggatttaaataatgctacacctaaagatgaatatgctatgccagtagcggaaatgttggtagattcagcagctggcttcgaatttttaagcatgttagatggttattctgggtataaccaaatatttattgctgaaagtgatgtgtcaaaaacagcatttcgatgtcctggtgctttaggcacttatgaatgggtggttatgccctttgggttgaaaaatgctggggccacttatcaaagggccatgaattccatgtttcatgattttattgacacatttatgcaagtttatattgatgatataatcatcaaatcctcctcagaagatagccatttggattaccttaggcaatctttcgaactaatgaggaaacatggattaaaaatgaatccattaaagtgtgctttttgtgtgcgtgcaggagatttccttggttttgtggtgcataaaaaaggcattgagataaatcaaaataagacaaaggctattcttgagacgaagcctccttcgaccaaaaaacagcttcaatctttgctaggaaaaatcaacttcttgaggcgattcatttcgaatctaagtggcaaagctcaaattttttcgccattacttcgactcaagaaagatgaaccattcaaatggaatgaagaccatcaaaaggctttcgatgaaattaaagaatatctgatcaagcctcctgtgttaatgcctcctagtcgaaacaagactatgaagttgtatattgctgcgtctgacaagaccattggtagcatgttggctcaggaatatgatgatggcatagaacatgcaatttattatcttagtcgtgtactaaatgatgcagaaactagatatactgccatagaaaaactttgtctttgtttgtatttctcttgtgcaaaacttaagcaatatataaagcctgttgatgtttatgtgtattctcattatgatattattaagcacatgttgtcaaaacctattctacacagtagaattggaaaatgggctttagcattaacagaatattctttaacgtacaagcctttgaaatctgttaagggtcaaattgtggcagattttattgtagatcactcagtggtcgaaatgccgcaagactatgtcgatacagagccttggattttgtatttcgatggttcgaaacacaaacatggaactggaattggaattttaataatatcccccaataaagttccaactaaattcaaatttaaaatcaaaggactttgttctaataatgaggctgagtatgaggctctaattacatgccttgaaattttaattagcctgggggcaagaaatgttaacataaggggtgattcagaattagtgttgaggcaattaacacaagaatacaaatgtgttaatgaacatttagcaaaatattttgttatagcaagttctcttctgaatcatttcgattacattaacattgagcatatacctcgacaagaaaaccaagaagcaaatgatctagcccaaatagcttcagggtacaaaatgtcgaaggaaaagttaactcagttgatcgaaataaaagataaactggtgttaccagagccattaagcactaaattgccaatgccaaaacttgtgggggcaagtacaccacaaaataatgaagatgaaagcatggatgatctccagggaaaaattcaaattttggccattgacaatatgttagataatgattggagaaagtccatggttgaatatttggaaaatccaataggtaatgtggctcgaaagatcaaatatagggctttaaattacgtgattatgggaaatgatttgtttaaaaagactgcagaaggagtgttgctgaaatgtctaagcgaatcagaagcatacttggcagtttcccatgttcacagtggggcttgtggatcacatcaagcaggccacaaaatgaaatggcttctatttcgacaaggtttgtattggccttcgatgttaaaagactgcatagaatttgctaaaggttgtcaggaatgccaaaagcatgcagggattcagcatgtacctgctagtgagttacactccataatcaaaccttggcctttcagaggatgggctttggacctaattggtgaaatcaagcctgcctcttctaagaaccagcgttatattatagttggtatcgattactttacaaaatggatcgaagcagtccctttgccaaatgttgatcaggaagcagtaattagtttcattcaaaattatattatttataggtatggtattcccgaaacaattaccactgatcaaggttcagtttttactggacgaaaaatgcaagaatttgcccaaaaaactagctttcgattattaacctcaacaccatattacgcgcaagcaaatggtcaggtcgaagcagccaataagattgtaattaacttgattaaaaaacacattgcccaaaagccaagaaattggaataaaacgttagatcaagttctatgggcatgtagaaattctcctaaggaatcaactaatactaccccatttcgactgacttatgggcatgatgctgtacttccggtcgaaatacatttgcaatcagccagggtacaaaaacaaatggatattccaatcgaccattattggaaaatgatgtcagatgagttgattgatttagatgaggagagattaagagcattagaagttttgactaaacaaaaagaaagagttgctaaagcttataataagaaagtaaagtcaaaaacttttaatattggagatttagtttggaaggttatcctgcccatagatagtaaggatcgagttttgggcaaatggtccccaaattgggaaggaccgtttaaaataattcagatctattcgaatggtgcttataagttagaggagctaacccctcagaaacgtactttgagcataaatggtaagtatttgaaaaaatataaaccaacactgctcgaagttaaaataagcatagaataagagaaatacgggaaacataaaaatggcgataacagtaaattgccacgaaagggcatgtgtcaatattacatcgaaaagtagaatcaaaatacaaaattcgaaataaagaaattataaattctactaatgcatgaccaagtcctcatatagtttcttcaaggtggccatctctttagttaagacctggtcagtactctccataactctcgcctcatctgctacagcttgagatgcgctaaaggccttcaggccttccctccctttttcagcaaccagtttctgaatcgagttagcggccttctcctggagttccttgcgtttggcctgctctgttacaattttctgccttagatcatcgacctgagacagcaaattcgtaatagttgcctcccaagaggaaatgttatcatcacaggctttgatctcagaagatccttctttcgcctctttggtgagacgttcgacttcatgttgagcagctcgggctttctcgagtagaaggatatgtgcctgtttctgggcatccagtctggcgtcattttcgcgttttttctgcacagtacttgcaaattgatcgataatggactcgatttggataactttgcctagaatctcatcagaggtaagggggttgtgcaatttcttcaaaaaattcaggtgcccaaaagcagcagaggggttctcttcaatggatttaagtacgtctgcccgtgcgtattccattgataacttcaagagcaggcaatcttggcgtactgaggagtttatgtcggcatcagatgaggacgaagcaccaggaatcttttcacttgaagtattggcttgacttgtgttcatcaggagtcgaagggctgcagcagggtcttcgtcttgcatttgaatgaatgtatcttctgcgatccctatgctagcggaaagcttagatgtcgaagacgccgggtaaatgtccgaacctccagcttcagcctcttgtatggcctcttcatcggaaaagttttcttcagatgaacttttctgactcgatccatgaggactgctggatccaataccttgaccttcaccctgttcctcaacattcactgcatccgtctcaggagcgggagatgttcgagcacatgagggtatttcttctacagaaacattttgttgtacctgattcgaattgtcatggaaaaggttaacaaatagtttcgtataagctatgattaaaatcacattaagaatgatacctcgatggtaggttgttcttgtggtaagttcggttgctcgacagggttgcccatctcagcaatagagggagtagcctctgcttcagtgccgtcaacatcagtcgaaggtggttggacgtcaacaggttgattgtcaccttgttcttttgaagacttggtctttttctttttcttcctggctggctcgccaccctcgacagtcacagaaggttcgggctcgacttgcttcactttctttttcttcttaggcatttgagcctgagaattgcctgtccctgtttgttcagcggacttggtcgaagtcgaaggtaactttctttttcttatgagtggtctttcctcttcttcctgcattacgagggtaaagaattgtcagaatatagacttgaaagagagttataatattgacattagaaataaaacttgcatctttctcttcgtctaattcgacgaccgcatgcttcgagcgttttaaggtcgtggtagtctcagtgctatcatctttcttttgactctgaaaaaataaagaaatatgaggcaaagacgttaagagtaaaagataagttcagaagagttaccttctcttcttgtttcctttcttggatctttaccccagtgggtttcttgggtctcacatcagctcgaggcgtttcggtgcttttctttgtcatgattgttttgcctaaaagtaagaatattagaaaaggcaaaaatacatatcaatttagaaagtcaaaagtaatttaatacctcgagcttgaaggtttgagcgaatattctcgaccgttggttgtgtaaaaccactctcaagtctggagatcataatagtagtgtctccaattgaacgggtcgaataatatttctcccaccaggtaacaaaccccatggtgcagaagtgggaatggttgaactcaaaaggatgcaggttatagttttcatcaagagaaatcttcaaaaacttcttgaaagtcttttccgaaagattggcccctcttatgacgtctcgaggatcttcgaacaagcttttagggcggatttgcgagaggccaaattgtcttgaaaccaaattaggctggtatccaaccaggcctaaatagttcgattgaacacctgtacgacaagacaggatctgtggattcaagtaaaaggaccatatttcgttcacttcttcttcattgtccggatcgacagcagggaaatagtcagtgaaccaggctgggccaacctctcgactaatgaatggagcatgttggggaagaaacttgtcaaagctcaggaaaatcctcatatactttaggaacagcttttgtgagctttgatttaaggacttgggtgttagtcgaagtgctctctggccttcgatcgagcgattggcaacttcttcagcataatcttgtgggattattaatcccatttcttgttcgaaagtggcattaagccacaactggagaagccacataggcccagatactaagaaggaagacccatccttcgatttcttcagatcatcgcatgcctcaccaagcgattcgtatagcactgctaacaagaggcgtccaaatccaaagttttgtccttcatgaatttgtaatgccatcggaataaatcttttggctacttgcaaggatttcgtgcaaaaaacatagtgagatagccacagggttaggaaggctacgtgctcttcatcagaaacttcctcttcgacgggtcctttgtgttcagctatatatttggaaaaggtgttttccttatatactagcttgatattgtcactagaattggtggggtcataagtttctccgctaggcctaaggcctgtgagggcggctacatctaagagagtaggggtcatcataccacatttaaattgaaaggtgttggtagaagactcgaaaaagtgcatagctgctatcaacatttctggtcgatattcaggaccagatcgagagaattgtatcaaatcaaagatgccatatgtcttccagaaatcctcatacgcttgttcaactcgatcaagccaaggtaggtaatccctataggctattgacggggcggatcgaaagagtttgtggggtttgcttaaacaattaaagttgtaaggctcactataaaaaatcctaggttcgcaagttgggtagcagggaaataccttgttcattgtactcgaaagtgattcttggtctggcaggggtccaccgaaagcgtaaactgttctttccactgcgaaagggatcatcacctccgattcccaggtttctgtgtgttcggcatcaccatgtggttctggaaccaccttttctccgtcattcctgattgtgaaatggtgccatttcccagcaaacggaactgcttgtccttgcgacattgtaagaaatctgaaaagggatgattttctcgcgaagggtttggtagttgttggaatcagtgagtaagagcttgggttcacgaagaacagtggcgaagttcggaaatgcggtgaggttgatgatgaaaggaataacgagtatctggaaataggaaagtttcgccggaaataatggaagcaaagaagaagaaaaggttttggaagcaaagaagaagaaaggttttggaagaagctgaaggggttttgtctggagttctggcgctatttatggagtttcactttaaaaaagggaaaaaaacaatataataagaatcaagggtcaaaaatcaatcacatcagatttcccttttgactccccagcgtgacacgtgtcccactctgcctagaaaggtggaattaatgatgggtagtgggaaatcgaggcgacggttacacagtgaacgtgcgatcatgacgccgtttcaggaagactggtagaagaagagaaaaaatgtcaacttctcatcttccttcgatctcgaatcgaagcacacattttttgggggcaatttgttagcccatatttttgatgagctaaaatatgctctaaatacgcattagatgtcgtcttgaatttcgaagcgtattaaagagcaagagtctggtcagatcctgttcgaatcgaaaagaaagaagaggtgattgaaagggattcacgggatcaaagaagtatttataaagtataaggctaagacaagaaagagggcttcgaaccattgggcgattcgaactggtgtatggtcgagtcgaagtcgaggcagcaagagttctggacttagcgcaatttctgacaaaacttcacaaaatcagttcgatttcgagtaatgtggataaccgttctaaggagcagttatatgcatgcaaggtatacgtagcaggacacttggcattaggatagtgttcgaccgttagggcagtttattttcgaatgtctatatatagcagttttttagtcagatttcagggtcgcaaatcattactacaagtccttatatactcaaagtacccagcgcagagagaaacgagtacgcaaggaaaatgtatgattgtgaaccattttaagtttctgtaaactttacatttcgaatgcaatgcaatttatgcttcactttataatttctgtcttttaaatggttcattcgatcgaatgaattcgttgagcctttaattctgcaatttatctttcccttgtcaatttacttccagcatttcgatttttgtcaaacaattttgctttctgcaaatctcaaaccagtgaatgtttgttgcaatgatgaacattaaaggctttacatctaaagcaaacacacaattggcatgctcctgagattcactagttgatctcgcaagcaattaacttagactagcggttgtttaccaaattccagtgtaaacagatagcaatgactacaaattgatcaatctgccaatacaatgataaaacatcggtttattctaagcaacactaaaaagtgatactacatgagcaaaaagattgaaattattgaccatgcagtatgaatgtacagcattatttatttaatttttctaatacaattttattttatattaatacaaaaactctcacaaaacaacttcttaactactagttaatcactacttttatacataaaaaaactagttaattactactgctacatagcagaaattccttaatttcacgtggtttgcctcagttgtttgccgcaggtttcagtatatccttaggaatcgtcgattgtcaaatcgttgttaaataacggcgctatatataattttagtattttgacgtttttaaatgaatttcttatttatgattatatatttacaatttttaatttcacttaaaaaaagagtttttttttcgatttagagagaaaaaaatagagtttttagttaacacactgttactatatagtgcggagacaattaccccacaagcttttcattaacttgtcataatataatatatgtgaatacaaactgtccctataatttaaaataaaataaataaaaagtcaataaatttataagtattgtctccacacatatatattatcctataatttacaatttttatatttattattgatgatattcttaattaaccaagtaaaaatattttttttataatttttaagataattattataaaaattaataaatttattacaaataacatttttatatgtgtaagtgcatgtatattatttattgaaatattttatttgaatttttcattaaaaatactaaatttattaacatgatatgtgcctcgttagagcagtgattcaatttaatctgatagtgagaacagaattgacagcagattccctttactgtgtgatgaaagagttgtacgaaatctttatgacatcaacccccaacatgagtggcccagtggacaagcccatcaatctaacatgtcggttgatagcacttgcataaacttttgttccttgcatcatctcatgtgtccccattctccattctctgcttccactaacgattaaacctcattgattagggttcaatgatttttcaatgaataaaattaattttaaattcttgattctaacagctcacgtattgtctgttgaatcaaatggattaaactcttgatatcataaagaaaattaaaaattgattctttgtgtaaaataaagaaatctaattaattatgcttgttatgttactatatcatttttcgggtgtggagtaacatcaaaatcaaagtaacaaagttacttgcatgttattctaactgttatgaatcaaccatcagacaaatcaaatcatgaggaggcaagcattaacagaataggagcaggattgctgagttggcattgcgggattgggcccttggatgatcctgtcgggaatatgctttttctgttaggataattgttgcaattatgttattgctagctttctctagaacctgcaaaaaaggaacgaataattagtaaatgaagcttataaattgccaacctgtaatgaatttgcaagcagaaatcaaagtttcctttccttatcttatcccattctttggaggaattctgggccccgaactccagaaacaccagcactcataacactaaccataattccagctaagtcgaatatggtttcatgttttgtaaaacaatttagatcccctttatcaaagtgtatctgtcttttacacaagttttttcactttattttatttccctcagaatcaattgttgtgttattcgtactattaaattagtccgataactaccatgtcgatcattattagttttatttccaccattgttcggagtaagtatatactattactttatgattaaacgtgttatttaaattgcaaataaaaactctttataatgaagtacaattgtttataactacaacaattatattgagtcaatttaacactcatcaaaggcagaaaagctttactttaagattagacagaggctcataccaatcatggcggtggttataattacacacatcagcaactgtaaaagatcttgcacagccacagaaaaaaaaatgcttgatgcacatctgataaactcactcaaggtctatgtattgatagtgtaaaagagagactgaatattaaatgataaaaatataaaataattgttttgtattggcagagtacacatatatatgcccaaatgtagattcaaagttcaaacattttgggcctagatcatccctcctagtcatagccatctgaattggatcgaccccaccccaaggtttgtgttgcatcacttgcatgcattcacccaccacagttgttatagttttctcgtgatttttgtattggaaaatactatggacaaatataattgatacagtcataattaattattgtcatgttgcaattacaaagactcctcaaagaatatgtttagtaaatcatgatcaagtagaaattgcaatggcaaactgttttttaaaatcttattagtcagttgtataaacccaaatttagatatattcaggtatgtaatattttccattttagtgctctgtttggaaatttgcgtgtcgaaatgttttttttatacgtacctacacaacactctttagccaaataccactgttcatggaggaatctgtcctgaaaggagtatagaaccagaaacaatatgcgtggtggtatctatcattctgaagaagagaaaaagtgggatacgtacaataataggactgtgacactactagaaaaatgtatgcacctttcatgtccctaaatttatgaacaaaagattcaggtatcgtttattgaatttgttttatatggagtgtaaagtcatcatatccaatactaataagtgtatgtttatataattctttttaaaataattactcttctttatttacatctaataaaaatgttatcacattaatttttaaattaagctaaatgaagcatgtttcataagaaattaacttttactgtaattgttacattttttagtgacaaagggagatgggtgaagacggtgaaggaaaaaaaatgaagataatgtctatgttgttcaaataacagtattaattgtattaaaatagttaatattaaaaaataaattagtaaatataacaacaaattgttgtgttggtgctatttattgtgcatcaaaatatataaaaataataattaacttgtaatttgtatagttggtatgggttgttttatctatcctggattttgttgtatcacacatataatcatttatatatatatgggctactattgtcactaccaaaaatcctattgagactaccaaagcatttgaaattacttggttatccttagttccatttccccacacctcctatccttcccctctttacgttcagctactctccctctttacatccaaaaacagaatttaaataaggctctcaaatttgcaaaaaaaaaaaaaaaaaaagaagatagcaatgactacaaattgatcaacctgccaataataaaacttcggagtattctaagcaacactaaacagtgatactacctaagcgaaaagattgaagtttgaaccacacatgatcaaggaaatgaaaataggcataccgccatgatctacaaatcagcaaaggagcaatcactatccagaatcccacaataaatccaattgtcatactgacaaaaaaccaatttactccatgcccatcacttccttcataactatgggttttcccattggagctgcagtttatgggcagtggtggaccacatagattgttgccgatgaagctggaggcatcaaaggtttgcaattgagttcctgttggaatatttcccttcaaatgattgtaagacaagtctagcatgctcagaaagctcaaatttgcaatgcttggagggatttcaccagaaagttgattcctcgaaaaatcaatggactgtaataatctcatattacctataccttgtggaatatgaccaatcaattggttgtgggacaagtttaaaaaattcaatccatttagatatgtgatttctcttggtatttcccctaataacttgttacttgacagatcaatgcttgttaccaaacccagaaagtttctgtactcatctcctcttcctttcagccatagtagagcactaactatactttgcatcgaagagtaaggcctactagattgtgcttgagaatagatacgaggatctgtactttggttcattagtgtcatggcactcaagttactgaaacagctccgtatattgccagacagattgttttgtgcaaggtctaaaacctgaagatgactcatctgacatatttcacttggaatgtggccggcaaaactgtttgatcgaaggcggaggattttcacatttaagaggttttctccaacccatgttggaatagttcctgaaagattattttccccaaggtccaaggatatcaattggttattcttcttcaaactggttggaaatattccagagagtgtgttgttacgaatttgtaaagactgcagctctgccaaggaacccatggattggggtaagttcccaacaaaatggttgctttgtaaatttacatccaccagaagtgtccaattcatccagcaatcaggtatctctcctgacaaattatttgatgcaagattcagaaattctaatcccattggctcgtcctgatcgttacataaaaagtcattcatggattcagagaatgaattgcttgaaagatctaactgaaacacatcacttgaaagatagggtaatttaccacacaagtgatttgagcttagatcaatagttgggatagatattggattctttaatgtagtcccaatctcaccatggatatgattacgagagaggtttaaataccaaacctgagaaagtgcttcccacatctgtgtgggaatagaatcgaaaatccccgtgttagatagtccaacatattcaagttggttttgtgactgaatccacaatggaaagctgggacctaactgccatgatgtcacttccaaatgggtaagttgaaaattaggaatccaattgggacccactgttaaagtgaaattgtttcctgatgcatgaatctccttcaagcttgtaagatttgcaagatcatcttccttgacaactccgtgaaaaagattgccgtcaatatgaagagagaacaatttagagagtgatcgaagactttcaaatggatttccactgaatttattcatagagagatcgagatatcttaatgatgaaagttttccaaatgatctaggaagagcaccaccaattgagttgttggaaaaaagtaacgtgtcaatatttttaaatgccccaatatgatctgtcagattgcctgaaagtcgtgaactctgaactgcaagtcttgtgagtccatgggaaatacaaggagcaagaatttctaaaagttcattaacctgttggttgagtttgagatatgataaatctatcacccttaagttgcagagattacccaaagaagttggaatgtttccttcaagttgattatgtgataaatcaagttcaacaagagaagtcaaatttcccagggcatcagaaatagtcccatgcaagttgttgcccattaggttgaggaacttgagacgatgaagaccgtataagcaatcaggtatagaagatgagaatgaattgaaagacaagtcaagattttgaagaagtgtgaggtttcgaataccaccaggaatcggaccgttgatttcattacctgataattgaagagaagcaagtttcttcaatttgaatatccacttggggacaaaagaaatggcaggggaataactagtgtaggaaagatggagagtttgcagagatgagaagttgagcaaggatggttcattatagtgagggagtttgcagtgtgacaaatataggtgggtcaaagaaggaagagattggagagtgtgtagccaatgaaatgctttggataggtttgcattactcaaataaagatattcaagcttccacatacttgatacccattctacattttcagcaaacagaggttcggaaaaataatttccgaggtcaaggtagagcaaattggagagattcccaatctgagatggaatcttccccatgaatggagtatcagagaggtcgaggtgagtcaaggaggtcattgcacaaaggaaagaaggaattgccataccttcaaaataattgtcgctcaagtcaagatatcgaagcttagagagattcccgatctgagagggtactcttccgttggcaaaaacataactcaggtcaagatacaccaaatttgagagattcccaatctgaggaggaatcttccccatgaatccagtatcagagaggttgaggtgagtcaaggaagtcattgtcccaaggaaagaaggaattgacataccttctccaaggaaataattgccgctcaagtccaagtaattcaaatgctttaaatcagccaaacaaggacttatctctccaccaaagctccatctcctataagcttcctcatcgaagagatagtggtaatcatagtcatactcgaaagcagaaggtgaagtgtggaggtgaagctgaagaagatgggaagtgacgttgtggcagaggactccataccagtggcaacagttggtattattaggattccaagaccaaagcctatttgaaggatcattcagattattcttaaacttcaaaagtgtctcacgctcacttgggatgcacacactctctctgcatggtaagctcaataacaaaaggtggacaaagacaagaatataaataatggaggaggaattcatgatcatgcaacgcaaatatagaaaacgagtgtttttttttagagctgaaacaagtgtagttgttggttctgcatataaatcatcaaacttctattatttatactgctgccctgcctgtttttctcttcactttcattattttttaccttttttattattgtgccaaatactaaaatattcttccattctttttttacgctggcctctttaaattatcgatttaattatccaattctcccgaattaattcttagaatacgaaattttttgttattactgtatctatctccctttttaaaattcctatatacactaaattcataaaaaaaatcaaaattaataacaaagaaatatgatttattcttgtgctgaatactaacataagaaacattcttttaggtacagtttttttttacaaaaataaataagaattattttattttaatttactctataatactgcttaaataaaaatttggtgtcattaaacttcaaattttaactattatttaatcaatccttccgttaaacttttgttacgtacaaaagtccaacatttttttaagaaaaaatcaagtcttttatttcatcaaatttaatattaaattatcaaattttcaatattcaaaactaaaaataatgtaaaagaaaattgtcttctaaatcatagcttacaccatcaagtcaatctcaaggtttttcattttttcatcttgaacctttggacacttcacaaagtccagccatgatgttaaggtctgacttcttcaacttgaaccataggtcactgcattaattaccttcatatcaagttccctggcattgacaacaaatgttgcgagttaagtcaagcaaggaaaaaaaaaatattattgatgaataaatcaattataggaaaagagtttactttaaagactattttggttaaaaaaatctataaaaaaagtatttcattccaagctagctatttaattttgatcaatttttcaattcacaaaataatattcttcttatatgtgaaaacgactaattaatcttcattgtcattaatgattgttgtgttgtctatttctaatttttttttaatcataatattattttctttttattaaaaattaattagtgagatacaaagaagtttaacttgatctatcataattattgagatcatagtttttccttttataagtcttggtctaaatttctccatgtattgtagatcatatttaacttaaaaagtaaattagaagatctacaaagaagtgtgacatgttttttaaattataaaattatggtcctagctatttattgttagaccacaagttttcatatattaaagtttttgtctaaatttcatttatggtgatagtttaagaatagtgatagaagacaaaaataaatattcaatttattgaaatatctaactcaattaattgatgaatacatcaattataggaaaagggtgtactttaaagactatttctattaaaaaatctataaaaaaattatttccttccaatctaattatttaattttaatcaatttttcagttcacaaaataatattctcttatataggaaaaaaagactagatttaattatcatcaattggaaaagtaattgtgtcatgtatttataattgtattctaacttgaatattattttatttatcatataaaaattaattagttatataaaagaagtaaaaaggatattaactttttttctcaaaaaaaaatcagtatcatattttatattttttacaagttatcaacttaaataagaggagaaacataattttaatttccattttactttttaaataattgcaagtgccaaatttaaataattatgagaatactcacgtccaatataatattctaaaaaaaaaatccatacgataacttaaacaatctataaagaaatataatttattcttgtgccaaatactaaaacaaaaaatattttttattttagtttaccgtatagaattgcttaaatcaatgaaatttttattttaagaaaatattaatgatttttttaaaactttaagtagtttacatcaaagataattaaatttggcttaattagtcttcaaattttaactattattcatatcaatcctttcgttaaacctgtacgtgttaagtaaccaacaaaaagtcttgtcttataaaattcaaacattctatgacatgcggtttgaacccataattaattttaaactatcaaattttaattattcaaaataaaagaaatgaaaacaaaattgtctcctagagaaaccgctggccactccaccaaatccatatcaaggtccccacttttccaacttgaaccatagactactccatcaaatctatgtcaaggtcctccattttaaggtccccacttttccaacttgaaccatagactacttcaaccttaggacactccacaaagtccacccatattaaggtctctgccttcttcaacttctgcaacgcatatatagaaaacaacttaattgtataagtgcttcttgcttctgcatataaatcataaaacttctattatttatactgctgcaagtgtctttcttgacttttttcttttttttatgatgtttcctttttttaattattgactttattatccaattctcccgagttaattcttagaataggaaataattttgaatttactttatctatctccctttttaaaattcctatacacaaaattttatattgaatttaactattatttaatatatcctttcgttaaacttttgttaattaaacaataaaagtccaacattttattaaaaaaattcaagtcttctatttcatggactccatcaagtcttttattaaaagtccaacttttgttaattcaagtcttttacaaaattttgttaattcaacttttgttaattattacaaaatttggtattgaatttaactattatttaattcaagccttttattaaaagttcaacttttgttaatttaaatattattttgttaattaaaccatagctgactccatcaagtctatctcaaggtcctgtattttttcatcttgaacctttggacactccacaaagtccagccatgttatggtctctggcttcaacttgaaccatagcctgggccacaaacaatatattaatgataaatacatcaattataggaaaagggtctaatttaaagactatttcagttaaaaaatctatataaaaaaaattatttcgttcatatcttggtatttaattttgatcaattttttaattcacaaaataatattctcttatatatgaaaaagctagactagatttaatcgtcatttggaatggttgttgtgtgatctatttctaattgtattcaaacatgaatattattttctttatcatataaaaattaattggtgatataaaaagaagtgtgaaaaagaatattaatttttttctaaaaaaaattagtagcatattttgtattttttacacgtcatcaacttaaataataggagaaacataattttaatttccattttaatttttaaataattttaattgccaaatttaagcaatcataaaatttctcatgttcaatataatattctaaaaaaaaaatattcatatgataacttaaataatctactaagaaatatgatttattcttatgcagatcgaatactaaaataagaaaaaaaatatattttagatcacaatataaaattgcttaaatcaatgaaatttcattttaagaaaatattaataatttttttaatactttaaatcaaagataattaaatttggtttaattagtcttcaaattttaactattatttaaatcaatcctttggttacacctttgttaagtaaatgataggatagcaagcaaggaggtgcaagcagtaacactctcacaaagataaagatctttaagccatcatttttttttccttttcttttctatgaactgtcatttcttatctctacatggaatgtctagaagttgaaaattacttgagctttctttacctactgctttccattttggcgaactgcttttctttctcataatgaactttccacttccaatgatggttgaacattaataattcttcatctattttgtctaaaactttccactcacttttggtgagtggtgtgaatgtcatgcagaatgtacgtataataaaataatgagaatggcaactgctagtactacttaattagaacaaaagtatcaaaattaaaacgaaaataactttgatgctgttaatatatgagtttaattttgatagatagtgtaaaaatttaaattgttaattaattagaaatcaccaaatgatttgtaaaacaattactaaaaaagttataggaaatatatataattaattaattgcaaatgaaagtgtatttaaattaaattcttaattaacatatccttattgtgatattttgtatattttttatttaattgagacagtggaatgagaccgcactataattttcagcacgggtgtggttgtcaaatataatagggatggctggtgaggaattttggaatgttagttggttttagactatatatcctcttgttcagttttcacattctcattagagttaagttgcttttggggaagaaccaatgtcttgaaattccctcttcaccagaagcagttttattgtgtctttatcgaagtcatcttctccagagacttgcctttaactttgaagataggaaatagatcagtcaaacattgtttcagtttatttggattttttttgaatgacatgtgatttacaaagacttcttacaacccacaatttctggcgcctgttgcggttaggaacataggctagcaaagacactaatcatttcaagagaaatgttaacacatgcacttttctaatatattattttttatattaaaatttattaaaataaaaaattcagctgatctcatattttatttagcaaatttttctcatatattaagtcttaggtttttaaaattataaagctaaaactaaaatgttttactaaatgtattttaaagtaaattttacacacaaaaatattatgattttataaaaattgtttggtcaagggagacatattgagccctcctaactataagctaccctgagggtttctatctttctttttcccacttaatttttgactttggcagcaagggttaaacctaccacatctacatgactatgtcttactttccaataagttacacctaaatagctaacatattcctcttgctcacgcacactatctttcgtaaacttttcacgatcatctttatattatcaaattcatttaattaaatatacaattatcttaatattataagcaagtctctgtataatcatgtagtgtttctaaattgaatgagcctaaatcacacactcctgaaaaaaaaaaagagtcttattgtcaaaatagccgtaaaaagatagaaatactatcttgatatactataaccttaatttttacaataaacctaaatgtctaaatatcataactcaaccatgcgacgaaatgacaatgtgttaattttgttttgtcctcaaccatgcgtatgcctcaggccgagggaattctcacacaccattcctaacaatttctaaggaattccacaacgtgtctatattgtagtgtaattcaaattaggcatttttacttgttttagttaactaatgtgtggttaataattgaagttagctacataaatacccatgtaaaccacggttaataataatgagatagaaatccaatttctgtaaattgctctcttccttctctcctattctatcatcaagattcatcatcaaagttaaaacagaattccaacatttggcaccagagcttctacgatccacggcggaacacggtagtgaacaatggcaatgcagaaaagcaatgaccagattccggcgaaattgccgatcttcgacggcaacaactatgagaggtggacggcgcaaatgaaggtggtgttcaggtatcaaggtgttcttgatatcataagcaccggtgttacacctttggcggagaatcccacagaagcattaagggcaacgcatcgcgaacaattgaagaaggatgacaaggcaatcttcttgattcatcaatgtgtggacgcgaacgttcttgagaagatcatagagtatgagactgctaaagaagcgtgggatgtgctggccgccacatacgccggagataagcaaacaaagaaggtgaaattgatggcaatgaggcgtcaattggggctattgcaaatggaatccaatgaatcagtggccaattttgtaaataggttagtagttctaactaatcaaatgaggagctgtggagaaattgtgtctgaatccatgaaagttgaaaaggttctcactggattaaccccaaattttgatgtagtcgtttctgcaatagagcaagctaaagacttagacacattgaaactagaacaattgctaggtgctttagaagctcatgaattaaaactaaagaacagggagagtataaagaaagatgataaagaacatgagaaagccttgtttgcacaatctcaaaagaaaggtggtggaagtgaatcttggaagaataagagaggaaaaggaaagtggaagaacaataagcaagatggcaacaatcctaagggagagaatcagaagaaagaaggtgacaacaatggaaagggaaagaagaaatctaaagaagacattcagtgttacaattgccaaagatatggtcattatgcagatgaatgtaataatcctaaagtgcctagaaagagaaatgaagaagctcaatttgcgcaagactctgataatcaggaaactgtgttgctgatggctattattaacactgaaacaggctgtgaagaatggtggtatttggatactggatgctcgaatcacatgacaggacataaggattggttctgtgagcttgatgaaacagtgagaagaagcatcaagtttggagatggaagaacagtaatggccaaaggaattggaagagtaagcataagaagagtagatggaagtaaagtggtgattagtgatgtactgtatgttcctaatatggaaagcaacttgcttagcttggggcaattgatggagaagggcctctcaatgcatatgcaaggtgagcatatggaagttgctgatacaaatggcaaatgtgtcttgaaagtacctgtatcaaagaacaggaccttcaaggttggtgtgagctcatttgagcagaaatgcctagctgctcaagtcaatgaaaatgtgtggaaatggcataagagattgggacacttgaacttcaacagcatgaggaagctgcagatgaagggcatggtagctggtttgccagaaattgaagctccaaagggtgtatgtggtaaatgctgtgaagggaaacagcccaggaaatcctacaagactacagtgccaacaagagccaagacaaagcttgaagttgttcattcagatgtgtgtggaccatttgaagctaagtctcatggaggtaacttgtattttgtctccttcatagacgattttactaagaaaatgtggatttacctgctgcaaaagaaaagtgaagtctttacaacatttaaatcatttaagacacttgttgaaaaacaagctggaaactcaatcaagttactaagaactgatggtgggggggagtttacatcaactgaatttgagaattactgcaaggaagaaggtttaattcatgaagtcatggcaccttacactcctcaacataatgggacagcagagaggagaaacaggactgtactaaatatggtaagatgtatgctgaaggagaaacatttaccaaaggagttctgggcagaagcagtgctcactgcaactcatattctgaatagaagccccacgaagaggcttgaggaattaacacctgaggaagcatggagtggtgtcaagcctagtgttaagcatttcaaagtcttcggctcactgtgctataggcatgtgcctgagcaaaatagaaggaagttggattcaagagctcaagctatgatacttgtaggatatcatagtactggagcatataaactgtttgaccccttgaacaaaagaattgtgataagcaatgatgttacagtggatgaagctaacgagtgggactggaataacagtgttgcagtacaaactagtgatacagtggaagttgaacttgatgatagtcaaatagaagaagaggatatgcaagctaataatgagccacaggagattgttgaaggcaacatagctgcacccttaagaagatctttaagacaaacaacaatgccagctagatatcaggactatgatgtatttcctgacagtgcaattaatattgatggtgatctgcaaaatctagtgttattagcagaagctgaacctgtatctcttgaggaagcactggctcaccctcactggaaggatgctatggatgaggaattgagatcaattcacaagaacaagacctgggaaatggtaaatttgccaagaaataagaaggctatagaagtaaagtgggtgttcaagacaaagattaaaccatctggtgagattgcaaaatacaaggcaaggctagtagcaaaaggatttctacagaaacctggcctcgatttcaatgaagtttatgcacctgtagccagaatagaaactgtaagaatgatagttgctattgctagcagaaagaaatggacattgagccagctagatgtaaaatctgctttcctcaatggtccattagaagaagaagtatacaccaagcaaccacctggctttgtcaagaagggcatggaagacaaggtgatgaagctgaacaaagccttatatggcttgaaacaggctccacgagcctggaacagaaggattgatggtttcctacagaagctacagtttgtaaaatgtactacagaacatggtgtatacatcaaacactgtggtacagctggtgtgataatactttgcctatatgtagatgatcttctggttactggtgatagtgaacaagagatcaaaagttttaaaatgaagatgatggaagagtttgagatgtctgatattggcaggcttggttacttcctaggtatggaatttgtgacatttgagataggcatatttcttcatcaaaagaaatatgcaacagacatattaaagagatttaatatgcttaattgcaaccctgctgccaccccttgtgaaccagggattaaactgactgctggtacagatacagagtttgttgactccactttgtacagacaactcattggctctctaaggtatctctgcaactccagaccagacattaccttcagtgttggtctggtaagtagatttatggagaaaccttgcaaagatcacttgctggcagcaaagagagtcctcagatatgtgaaaggtacactggaatgtggcatattatttcctactgcaacagaaaactctgaaattgaagtcactggttacacagatgcagattggagtggagacattgtggatagaaagagcacttcagggtatattttcatgcttggtgatgctcccatatcttggtgttctaagaagcaagaggtggtagcattgtctagttgtgaagctgagtatatctcagctgcatttggtgctagtcaggctctttggttaagcatgctgctcaaagaattgaatgtcaagtgctgtgaaataatgaagctaagagttgataatagatctgctattgacttggctaaacatccaatagctcatggacgtagcaagcacatagaagtcaaatatcacttccttcgtgatcaagtcaataaaggcaacttagcactggaatattgcagaagtgaagatcagtttgctgatatattaaccaaagcagtgaagcttagaagacttgaagagatgaagaacaagacaggaatgctcatgttaagtaatttgaattaggtggtgtattgtagtgtaattcaaattaggcatttttacttgttttagttaactaatgtgtggttaataattgaagttagctacataaatacccatgtaaaccacggttaataataatgagatagaaatccaatttctgtaaattgctctcttccttctctcctattctatcatcaagattcatcatcaaagttaaaacagaattccaacagtctatgcttcagacaacaataacgtacgaaataaacaagtagcatctaataacgttaaaataagcacacacatatatcgagccaaccaacgttggaggtagaagaacaacaataatatcaatatttaatttcatttagggttaatttattaggaactcaacgtaaaataataatttattagaaaacaaacacaaaatttgagtatttattaaaaataaaaacatatttaatttcatttagtgtttaatagtgttttggtctatgtttttttgtctaatagtaggtgtggttgtgtaggtgtgtttttttgttgagaaaatctttatataattatgagctatgataaaatcaaaaatccatgatgagttccgtatttaaaaatcgttgtagaattatagggttgattaaaatgaaacgtatttgtcattgagtgcatattaaaatgaaacgtacatgcattacaataaataaaacatttaaactttaattttaatatagaatttttctaaattgttatggtgcatgattaaactttaatcatggagtacacattttttccttatataagtaacatggttttacgtgatttgtttattatttatcttttcttctagttgtgttcattgttgtttgaaaattttctttaatattttgttgtttggacaatcacttagttacaccgtatgaaattcacggattggtttggaggcttgactatcaaatttcatctcgcatcagattaaacatcgcattactataccatatagttatatgtgattttttcccattcaattttatatttagctacacattaaaattaatttataccaaattttttgcatataggctttttttagtgaatcaaattcttttttaattcaaattgggacattagttttcgtatctgttaagaataattgatacctaatttaaataattgtattaaattctaattataaaaaaatcccgtatttattatcataaaaatatttaacaatttaatcattaatttcgtagtataattgatactggacaactaatatttattgcacttaatttcatttgataataactgatatttcttcaatcgcgtatcatttgttgcaaaacgaacatccaatatcattggagaacaatgttgatgtaacgattaattcattgataatcacatgaatgtattaaatccaggatattaaatttacaaataattttttgtttttcaattatattttaacaataattaagaaataaatctaaatcattctacatttacatttgtttataggtatttgggatattggccggagatgctatatgggaatctaaattttgcttaacacaaatgtggtatgcaaggaaaaatcaaattgaaatatttttaaccaccacttcaaatttttaaaagatttgtttcaaaataaggatatgaagaacaaattgtttttagagaacatttcctccatgatgttttcctttcctttaggtgaaaaaaaaatagacatttccaaaaataatgaaagtgcatttatataatgttgtttatatagagaagtctttgaaaatataagtcaagtactattactacaaactattctgtatcatatatctcttatatattttgatataaaatatttattattttttttaatttcttagtaacatgtgcatgaaagtcaaatcaaaccgaatctgaggatttatgtggcatttaacttttatcaattttttccctcaaagatcacactctaatcaagtaaaatagagacaaatttaaaagacaatgactaaattaaatatggatttggctattgccatattaccctcggagaggtaaaagatcattaataagtaataactttaataatagtaatagaaacagtagacttgtaagcataaagttgttcctaggaaaacaataagccacaaagaaatccccaagaatgtattcattcctaatccacaaagaaaagcccgtatgcgcttactgtgttgtcaatcccagagggctttccatgaatgatcttctccaaggaattttctataacaaaccaaagaactaaatataacaagctctcaacattactgaaatattctcaaaggaaagatctcaaagggatggcaagcctagtttttttcttttttttatcatagaaacattatagtttctccctagcaagaataatttgtgatggattgaaatttcctatatgtatctatgaacctgtggcataaagtttgtttttaagcacacatgacatgacatgataatacctagctttggattaccatgtgacaaaaaattactttcctaactttagtttccccgaaaggtaaaattaaccaaatctgaaaagcgtttcgtgtaatattggctacgcatgactaattaacttctgaaacggtcagctacttcataaccttttgatgtcattctccccaacaaaaaacaacttgttacctagcaacagcttgcttgcttgctttctcacgcacttagtgaccctctgtgcttgtgaaataaattgttataacctttattgtttttcatcaatattaccaaaatttccttaaaatgttcaatatttcgtaatcttcataattaattcaaaattctcaaaagattagtatatgaccttttttcttgtttgtactaggagaggaataaatgaaaaaaaaaatcagaaatttgtggattgctatttgctcatatgatgtgtctattagttctttgaaatttgtgaaaacagcctctttgcatatgcaagggtacggctgcgtacaacatccctcccccataccttcgcatagcgaagaacctctggacaatggggtacgaagttttatatttatttttaccttttaatagatatattgtgctgtcatcccaagagaaggatcaaacttcgatgatgcagaggtgctaagatattgcaagaagaatcttgcatctttcaaagtccctaaaaaggtcttcattactgattctttgcccaagactgccaccggaaagattttgcgtcgtcttgtggcaaaacactttgtctctcaaatttgagcaacccaagtcctacttttgaagcctccatacctggccatacatagttggagtccacacacataaatttcaacaataatttggcaacttggcatttaagaggagggtaattctgcaaatggtctttcatacaggatacaatagattgtagttttgaatattcacgtcaaatgttcacaatgtaatgttttcaatgttttatagatcttaaataccagtagcagacaagcatgtcatgcttatgcttttttgctatcgtgctcctgttccttgccactggtcttgatgaagccaagcattgtctctttgccttttaagttgtacataattgcaaaacggatacatgtaaaagaataaatcttattaaaggtaaggttgattttaaagtgggcaagaatgcatccatgatcttaagtaaataaaattcaagcgaatatgtggtttggattagagaatagtattatccagtgcacactaaattggagagattcccaacatgtggtttcaaaactcaagagtacttaccaactatttcaattttaatctacgtgatctagctaatgttttctatcagagaattacaactagttgatctcaagtacaaaactatactgaatatgcaaatctttacatccaaaaactgaatttaaataaggctctcaaatttgaaaaaaaagaagatagcaatgactacaaattgatcaacctgccaatacaatgataaaacatcagtgtattctaagcaacactaaacagtgatactacatgagcaaaaagattgaagtttgaaccacacatgatcaaggaaatgaaaataggcataccgccatgatctacaaatcagcaaaggagcaatcactatccagaatcccacaataaatccaattgccgcactgacaaacaaccaatccactccatgcccatcacttccttcataactatgagttttcccattggagctgcagtttatggaaagtggtggaccacatagattgttgccaataaagctggaggcatcaaaggtttgcaattgtgttcctgttggaatttttcccttcaaatgattataagacaagtctagcatgcttaaaaagctcaaatttgaaatgggtggagggatttcaccagaaagttgattcctagaaaaatcaatggactgtaatgatcccatattaccaatgccttgtggaatatgaccaatcacttggttgtgggataagttcaaaaagttcaatccatttagacgtgtgatttctctaggtatttctcctaataatttgttacttgacagatcaatgcttgttaccaaacccagaatgtttcagtactcatcttctcttcctttcagccatagtatcacaccaactatactatatccggaagagtaatgtctactattttgtgctacagaatagatacgaggatctgaactttggttcattagtttcatggcactcaagttaattactgaaacaacttggtatattaccagacagattgctttgtgcaaggtctaaaacctgaagatgactcatctgacatatttcatttggaatgtgaccgacaaaactgtttgatcgaaggtggaggattttcatgtttaagagttttctccaacccatgttggaatacttcctgaaagattattttccccaaggtccaaggatatcaattggttattcttcttcaaacaggtaggaaatattcctgagagtgtgttgttaccaatttgtaaagactgcagctcagacaaggaacccatggatgagggtaagttcccaacaaaatggttgctttgtaaattcacttccactagaaatggccaattaattcaacaatcaggtatttctcctgacagattatttgatgcaagattgagaatttctaattgcattggcttgtcctgattgttacataaaaaatcttgcatggattcagagaatgaattggatgaaaggtctaacccatacacatcatttgaaagatagggtaatttaccacataagtgatttgtgcttagatcaacagttaggatagatattggattttttaatgtagtcacaagctcaccatggatatgattatgagagtggtttaaatacaaaacctgagattgtgcttcccacatctgtgtaggaatagaatcaataatccctgtgttagacatgcctaaatatttaagttttttttgtgactgaatccacgatggaaagctgggacctaactgccatgatcccacatccaaataggtaagctgaaaactaggaagccaattggaaccaacttttaaagtgaaattgttccctgatgcatgaaactccttcaagcttgtaagatttgcaagatcatcttccttgacaactccttgaaaattattgccatcaatacgcagagatgacaatttagagagtgatccaatactttcaaatggatttccactgaatttattaatagacagattgagatatcttaatgatgaaagttttccaaatgatattggaagagcaccaccaattaagttgttggaaaaatctagcatgtcaatatttttaaaagccccaatttgatctatcagattgcctgaaagttgtgaactccgaactgcaagtgttgtgattccctaggaaatacaaggagcaagaatttctaaaagttcattaacctgttggttgagtttgagatatgataaacctatctcccttaagttgcagagattagccaaagaagttgaaatggttccttcaagtagattatatgacaaatcaagttcaacaagagaagtcaaatttcccagggcatcagaaatagtcccatgtaagttgttgtccattaggttcaggaacttgagacgatgaagaccgtataagcaatcaggtatagaagatgagaatgaattgaaagacaagtcaagattttgaagaagtgtgaggtttcgaataccaccaggaatcggaccttggatttcattaccccataattgaagagaaacaagtttattcaatttgagtatccacttggggacaaaagaaatggcaggggaataactagtacgggaaagatcgagaatttgcagagatgagaagttgagcaaggatggttcattatagtgagggagtgtgcatcctgacaaatataggtgggtcaaagaaggaagagattggagagtgtgtagccaatgaaatgctttggataggtttgcatttcttaaacttcataagtgtctcacgctcacttgggatgcacacactctctctgcaaggtaacctaaacaaccaaagctccacaaacacaacaatataaataatggaggaggaattcatgttcatgcaacgcatatatgaaacaacttaattgtataagtgcttcttgcttctgcatattaaacttacttctttctattatttatactgccgcaactgcctttctttcttcattcttatttcttttttaattcacaaaatgatatttttcttatatatgaaaaagggctagttttcatcgtcataatttgaaataggttgttgtgtcgtctattaatttctaattgtatttgaatctagatattgttctctttttaatataaaaattaattagtgagatacaaagaagtgtgaaatataatgcttgtttaacttggtctatcataattacacagaccataattttttcttttataagtcttgcttcaaacttctccatgtatcgtagctattttattgttagactaataatacgtatatagaatataccatagaagggtttgcatttaaaattttattccactaatggtggtggttgcagaatgcacaaatatgtagaggtatatatgtctacaacgagccatttaggattaaaagtgtctaatcacaccaccattattttgcactagtttattttattttggtttaactacccttttagtcttgatagttgtgataatttttctttttagtccctataattttaaacatttattttggttcctatatttataattttttaaccttttggtcctcagcaggaagtttcaactcacacataaacatgaacaaaattaataaaaatagggaagcaaactcaggcacaactgaactgcaatggaggtatgggactaaaccaatacacattccattattcttgagtctgccaccgacccctgcaagcttagcatttgccaattgccctgatgtaatctccttcttcattgtcactcatcaagttggagtggtatcacagcattgaactaagttgatcgttctaatggtagtttgtgccttcatggttgggatgatgttgcaggttccggtttgttgttgagggaaaagatgatcagccacgtctcgtgtgtgctaagagagtgcctttgccctctccacaaccttagtttcaacaattgacgttagtcgaaacttgatggtgagaatcaaaagagtaaaaaaaaaaatgtgtttaattcataatatatattcgaccatttgatctttgacaaattttttcttcaaagaaaatctttaatatttaaaaaattttattttaaatctccatcgtcaaataatgacgtaccttcaatatttatttgaaacttgtcttccaccccgtctcccttaagctctccacattcacacacatatgaacactaagctctagacaaaaataaataaataaataaccacgagaaataatatataactctttagtggaataaataaataaacactaagctctccacattcacacacatgaaatgatccagactaagttaacaaactaaatggtcttcttccgtgagttcacaatgaaaccacagaatttattttcatccactagtttccttcccaaatgttttctaaaacataacacactacagaaccttctaataatttttttttttttaaaaaaaaaccaacattttacatgtagcaccacaacttaacaatttctagctacaaccctgctctgtatactcattctaaacttgttccatagactataatataatctatctccactcattcattcatcaagattgaaaaatggattcaaatgcttgtctaccacacttgctagtgttagcaataacattggtattggttagtcatgcaatgggagattcagctcaagacaaacagagatgtgcagaattcctgacaggtgttacaacgtgtctgccatatttgggtggtgacacgaaagcacccacagcagattgttgcagtggtctcacacaagccatgaagaccaacaagaagtgtgtctgcgttattctcaaagacagggatgatcctgatcttggcttaaagattaacatgacaattgctgctggtctcccttctctttgcaaaacacctgataatttctcagtgttctggtatgttcaatttcaaattaagtcttccttttttcttaaagaacactacactacagtgttatgtttccatttcctatgcaatgaatgatctataagtcttgttagtggtggccatatcacaacttatgtttttatctttcattgtttgatgataacctgtttttaataggaaaaaaaaagtctttatttctattttcaaaaactatttttagttttcaagatacaactaaacaagttcttcagactgtttggtggagaatgatgtgagacacagaatgtggaattgagagggaacttgaacaagattaaaacagaagaagcagagaaaacattttcccgatgtttttgtttttttggattttagaacacttattttggatacgattctccaaacttatatattttggaagagaaattgattactaagtagtctaaaattattttataaaacagtttcttaactgagaatactcagaccctaaatcttccagttttagtatatttctaaaagaaaatcagaatatttgtggtctaagttttattattatcaagcctttcattttccttaaagaacaaaagagtgtcacattccatttactatgtaatgaatggtcaacaagtcatgtacttcaaagttttctacttttctcattcgtaactggacaataacacattttaaaggggaaaacaagggcatctaaatctgccaattttactttgtttgtgtatctgttatctctgagttttcaactccgaagttaaaattatttgaggtttgattttttctcaagaaattcttgttttaaattatttgagcagcacttctgcacttggatcctaaatcacctgaagctcaagcttttaatgaaattgatcagaaatccaatggtggttctctccgtccttcgcccactccttctggtagtgatcctttcaacaaaatatttcatttttggaatttatttttgacattgacttttgagtttcaatggtgtagtactaaattttgcatttatttttaatgtgttcttttgtgcattcagttgaaggaagttcccagaatggtagaaagcaggggacagatgaaacggcgacagctaagaatagtgaatcttatatcaggaagagattgttagaaagtttggttgcagttgcagggcttctaatttggctttcatgagcttaactcaaatactacctatatattaccattttcatatcacgttgaaatgtaaaccattgattagttgatagtgtaaaaatatttacactcgagtgtattaaatctctgacagactcacaatagatattattgcaaaaccttattggagatttatttttgtgagcattttgcctttaatctcatacaactaaatgcttgttacacaaatcttattgttcagtcctaaaattcttttatctctaataagaaataacgacttgttgtaatagaaattaaaatcttattattttttttaagtacactacttgaggatgattttggtatcccacttttcaatttgattttggtatcccacttttcaattgctcggttcgtttccatattttcaaattttacaaatttgattcattagttaacttaattgatatcaaattttacattttggtattcatatttacaaaattaacaaactaatttttttttcctcgtaaagtctaaaacagataattcgtcaagcatgatatggtttctttagccaagtacaagataatctagattctacttgtatccttccaagatagtctaagaatgaatgagttaagttgaatatggaaaaacaaatattcattaagatgttatggtttgattatcccaataacttttctcccatgactcaacttgttgaattgagctttcctttctctgtaatgttgcatacaaagttggaggatcaaaaggggcaggcatggtgcaagggtcggtatttgcaggaaccttgaccaatgattccatcataaatttctttactgatccttctgctccacaaaccattgactccacacatagttctgtagcattagcacttatggagggtttgtatctgaagagtttagcatatgaattcaggagatgaaacatgtagtcgtacacgtagagtggtagagtcacatgacagaatgtatttttgactgactgaccaagcagaaccttcaatgtacaccttatatctgcacgatcatgattgaattgaaacatttatttattgataaactgaacatatatatccaataacaaaaatatattattacatataattataactgaagcatgaatggacagtttgaatgttatacctattagtgcattgactaggcaagtctgatttgttgaacccctcttgtgattctcgaaaccaatcctggaacaaaattttcatttgtcaagaaggaagctatatatgtggctttattgtgagtcaattaacagacaaaatatattgtcaagaagtaaaaaatcagtaatgttcaataacaggttatttcctttgattttgaatgtacttttaagttgtgtatgaataaaagattaaaagttaaaaaagtgtataatgttatatacaatattgatactggccattgtgttgcttgaatttgcctgttatttctagtttctgcacaccatgtgcttaagccaattttatataatgaaacttttgcttatgagaaatattacatacaaaattaatttttcatatccaaataataaaactactttcaataagtgtaatcaaacaaagctaataagaagtgtgatacctgggcaaataaacgagcattccaatcttgattttcagaaacattgcatttcatgagatcttgtctggtttgagcaacagctggattacctttccagtaagcataaggctctctgttcagccatggtatcctcgtagtgccttctttcaaccctcccaacaaaatatgccatggctttatattaatctctgccctgtgcaccacacatacaatactttttacttatttaaaaattaaggtcgccttagggtgattgtcaattttcaattttccgttttaaaatataatttcgaaatacaaacatgttcaacaaaaattgcactaagttgattttttacatctttctgaaatggttttgcatataaatcatcaaacttctattatttatactgctgccctgcctgtttttttcttcactttcattattttttaccttttttattattttttaccttctaaaatgaagataatgtctatgttgttcaaataacagtattaattgtattaaaatagttaatattaaaaaatatattagtaaatataacattgttgtgttggtgctatttactgtgcatcaaaatatgtaaaaaataataattaacttgtaatttgtatagttggtatgggttgttttatctatcctggattttgttgtatcacacatataatcatttatatatatatatgggctattattgtcactaccaaaaatgctattgacactaccaaagcatttgaaattacttggttatccttagttccatttccccacacctcctatccttcccctctttacgttcagctactctccctctttacatccaaaaacagaatttaaataaggctctcaaatttgaaaaaaaaaaaaagaagatagcaatgactacaaattgatcaacctgccaataataaaacttcggagtattctaagcaacactaaacagtgatactacctaagcgaaaagattgaagtttgaaccacacatgatcaaggaaatgaaaataggcataccgccatgatctacaaatcagcaaaggagcaatcactatccagaatcccacaataaatccaattgtcatactgacaaaaaaccaatttactccatgcccatcacttccttcataactatgggttttcccattggagctgcagtttatgggcagtggtggaccacatagattgttgccgatgaagctggaggcattaaaggtttgcaattgagttcctgttggaatatttcccttcaaatgattgtaagacaagtctagcatgctcagaaagctcaaatttgcaatgcttggagggatttcaccaaaaagttgattcctcgaaaaatcaatggactgtaatgatctcatattacctataccttgtggaatatgaccaatcaattggttgtgggacatgtttaaaaaattcaatccatttagatatgtgatttctcttggtatttcccctaataacttgttacttgacagatcaatgcttgttaccaaacccagaatgtttctgtactcatctcctcttcctttcagccatagtagcacactaactatactttgcctggaagagtaatacctaccaccttgtgcttgagaatagatacgaggatctgtactttggttctttagtgtcatggcactcaagttactgaaacagctcggtatattgccagacagattgttttgtgcaaggtctaaaacctgaagatgactcatctgacatatttcatttggaatgtggccggcaaaactgtttgatcgaaggcggaggattttcacatttaagaggttttctccaacccatgttggaatagttcctgaaagattattttccccaaggtccaaggatatcaattggttattcttcttcaaactggttggaaatattccagagagtgtgttgttacgaatttgtaaagactgcagctctgccaaggaacccatggattggggtaagttcccaacaaaatggttgctttgtaaatttacatccgcaagaagtgtccaattcatccagcaatcaggtatctctcctgacaaattatttgatgcaagattcagaaattctaatcgcattggctcgtcctgatcgttacataaaaagtcattcatggattcagagaatgaattgcttgaaagatctaactgaaacacatcacttgaaagatagggtaatttaccacacaagtgatttgagcttagatcaatagttgggatagatattggattctttaatgtagtcccaatctcaccatggatatgattacgagagaggtttaaatacaaaacctgagaaagtgcttcccacatctgtgtgggaatagaatcgaaaatccccgtgttagatagtccaacatattcaagttggttttgtgactgaatccacaatggaaagctgggacctaactgccatgatgtcacttccaaatagttaagttgaaaattaggaatccaattgggacccactgttaaagtgaaattgtttcctgatgcatgaatctccgtcaagcttgtaagatttgcaagatcatcttccttgacaactccgtgaaaaagattgccgtcaatatgaagagataacaatttagagagtgatcgaagactttcaaatggatttccactgaatttattcatagagagatcgagatatcttaatgatgaaagttttccaaatgatctaggaagagcaccaccaattgagttgttggaaaaaagtaacgtgtcaatatttttaaatgccccaatatgatctgtcagattgcctgaaagtcgtgaactctgaactgcaagtcttgtgagtccatgggaaatacaaggagcaagaatttctaaaagttcattaacctgttggttgagtttgagatatgataaatctatcacccttaagttgcagagattacccaaagaagttggaatgtttccttcaagttgattatgtgataaatcaagttcaacaagagaagtcaaatttcccagggcatcagaaatagtcccatgcaagttgttgcccattaggttgaggaacttgagacgatgaagaccgtataagcaatcaggtatagaagatgagaatgaattgaaagacaagtcaagattttgaagaagtgtgaggtttcgaataccaccaggaatcggaccttggaagccattatccagtaattgaagagaaacaagtttcttcaatttgaatatccacttggggacaaaagaaatggcaggggaataactagtacgggaaagatggagggtttgcagagatgagaagttgagcaaggatggttcattgtagtgagggagtttgcatcctgacaaatataggtgggtcaaagaaggaagagattggagagtgtgtagccaatgaaatgctttggataggtttgcataactcaaatcaagatattcaagcttccacatacttgatacccattctacattttcagctaacagaggttcgagatcaaaataacctccgaggtcaaggtagaccaaattggagagattcccaatctgagatggaatcttccccatgaatccagtaagagagaggtcgaggtgagtcaaggaggtcattgcacaaaggaaagaaggaattgccataccttcaaaataattgtggctcaagtcaagatatcgaagcttagagagattcccgatctgagagggtactgttccgttggcaacatctgaactcaggtcaagatacaccaaatttgagagattcccaatctgaggaggaatcttcccatagaatccagtagcagagaggttaaggtgagtcaaggaagtcattgtcccaaggaaagaaggaattgacataccttctccaagaaatgtattgccgctcaagtccaagtaattcaaatgctttaaatcagccaaacaaggacttatctctccaccaaagctccatctcctataagcttcaatatcatagaaactaccgtagccatagccatgatagaaagcagaatctgaagagttgaggtgaagctgaagaagatgggaagtgatgttgtggcagaggactccataccagtggcaacagttggtatgattatgattccaagaccaaagcctatttgaaggatctatgagattattcttaaacttcaaaagtgtctcacgctcacttgggatgcacacactctctctgcatggtaagctcaacaaccaaagctggacaaagacaagaatataaatggaggaggaattcatgatcatgcaacgcaaatatagaaaacgagtgttttttttttagagctgatcgaaacaagtgttttttttttagagctgaaacaagtctacttcttgcttctgcatattaataatcaaacttctattatttatactgctgccctgcctgtttttttcttcactttcattgttttttttacctttttttgttattgtgcctaattctaaattatcgacttaattatccaattctcccgaattaattcttagaatacgaaattttttgtatttactgtatcaatctccctttttaaaattcctatatacactaaattcataaaaaaaatcaaaattaataacaaagaaatatgatttattcttgtgctgaatactaacataagaaacattctttttggtacagttttttatttttttttacaaaaataagtaagaatcattttattttaatttacactataatctgcttaaatgaaaatttggtgtcattaaaattcaaattttaacttttatttaatcaatcctttcgttaaacttttgttgcgtacaaaagtccaatatttttttaagaaaaaaatcaagtcttctatttcatcaaatcccaacccatgattaatattaaattatcaaattttcaatattcaaactaaaaataatgtaaaagaaaattgtcttctaaatcatagctcacaccatcaagttaatctcaaggttttccattttttcatcttgaacctttggacactccacaaagtccagccatgatgttaaggtctgacttcttcaacttgaaccatagatcactgcattacttttatatcaaacaaatgttgcgagttaagtaaagcaaggaaaaaaaatataattgatgaataaatcaattataggaaaagtgtttactttaaagataattttggttaaaaaaatctataaaaaaaattattttgttctaagctagctatttaattttgatcaatttttcaattcacaaaataatattcttcttatatgtgaaaagactaattaatcttcattgtcattaatgattgttgtgttgtctatttctaattgtttttttaatcataatattattttcttttttattaaaaatttattagtgagatacaaagaagtttaaattgcttgtttagcttggtctatcataattattgagatcatagtttttccttttataagtcttgttccaaatttctccatgtattgtagatcatatttaacttaaaaagtttaatataatattctaaaaaaaatccatacgataacttaaacaatctacaaagaaatataatttattcttgtgtcaaatgctaaaacaagaaacatttttttattttagtttaccgtatagaattgcttaaatcaatgaaatttttattttaagaaaatattaatgatttttatatcaaaggtaattaaatttggcttaattaatcttcaaattttaactattattcaaatcaatcctttcgttaaacctgtacatgttaagtaaacaacaaaaagtcttgccttataaaattcaaacattttattacatgtggtttgaacccataattaattttaaactatcaaattttaattattcaaaataaaagaaatgaaaacaaaattgactcctagacaaaccgctggccacctgattgttgccatttatttcttttactcttttttttgtttcttttattttgtccaactttaactttaactttaattagtgaggctcacgcggatttgtgctttttaaactttcttttcattttaccttactttctgtgtaacaaccaagaggaaacattcaacacgcaaagatgaattcaaaattcaacacggattcaaattatttaaagaccactgtgtagcagcaattgtttatgaagtttcaaattatttaaagaccactgtgcaagaagaaacattcaacaggcaaagatgaatacaaaatttcatttttaaagatcactctgtaaaagagacgacgtctaaggtggatcattgttggaaacaaatttggcagctgtttttttattatcttgtacaatccccagcgttttctctgaaaactaaaccttggccaattctgaacaaatgaattatgatcggtttggttttgtatattttttttcatctcaaactatttttttttatgagaactaaataagaattaaagaaataattaaacaaattcaaaatgtcacattttctagactcttcccactactcaaatctcacattaattaaatcattcatttctaaactcactactatcctaaagtagtaaagtccctctcatccttcataattccctttaaatctattgagtaaagatagagacagaataaagaataattcgaataaagacagtaatggccgatggcgtgccgttttgtgcattatatgatgtggtccacaatttgaaacatatataaattatattatatatgtctaatttatattatggaaaatcataataaaggtctaattatattattgaaaatactatttttacatttcacaagataaatgtcttatttattatgtctaatataaattatactagataaatgtctaatttatattattgaagttcaatgaataaatatttttgcatatataaaattatatcttggattttataacaaacaatttaaattgtgaaaataaattacccttcaccagcagcaaggtcgaagcagcttttgtagcactgagggaagcaaaggttttgtgtgaaaccactttccataagagaattgatgagattccaaaggattttctgtccaaccaacaagccttgatgcatttctcactttcagtatgccccttaatttgtttttcagccgaagtcctgcacgtgtaagcttcttcccctgttctcttcacatgctaagaacatatttttaaagggaaattcttgttgttaagaatttgtacgtgtatgcaacacttttgaactccgtcaaagatttttttttttaaattaacatttccaccaataatatgcaaacacgtttgtcttgggttggtgcaaaaaattctcgtgctctatagaaatttgaaatatggatctacgtttaacttccttgaatgaaagaaatatgtaaagggtacgatgtaaaatttacccacggacttaacttaaatgtggttgtaattaattattttttttagagaaaaatgattatgtaaaaaaatttatacaattatttaagtacaatttattatatataatacattttttattaattattttaaaataattcagatgataatttatgattaaatgattatataaaattattttatatggttagtatattgacattaaacttttatttttaaatgataaaacttaaatataatatttaagatattttgacagtgttctttagtcaaaattagaatttaatcttggtaatctttataataagtattttcattaaatatcaagatattttattgaggtataactccaatctactactgatgagaaaacaaaactatatataattccaatcccatttttaatcaattaggagttacatccctttaaaaaatccagacttttcaatgactaacaccctttttctatgcaatatacaaggatcaagtttgaatgtacaatcttgggatggaaatcaaattcgtatttggttgacgatattaaaaaagtagtcattcttttcttacagctttctgtcagaaaattgtaaattaaatcaaacatggatagaatatgctggaagccgtaaatgagtatttaattaagaagttgattggctttaaaaacttacaagagttccttgcattatgactagaaatgcaagggcaactattgtcaaaaatctcgagctaatgttaagggccatggctcaagcagaagaagatcgttgggataataagccaaaactctagcttgggagtttggaagtttggttgtgcttttgcatatactttgaggattgttgtgatgctttatggctagttaatgagggtatttatagcgtattcttcaagaggacaattttattcttttcttagtgatgaaaagggatattttatagaaggtggacttttcgatacgaatcaaaagagtggaaaacaaagaacaatagtttagttttttttttttacagaagtttgatttaacctacatgacatgaaaatgctttggaaaattttgattacacttaacacttttgtgtagagctttttataattcaaaaagaaatgagaagataaaaaaagaagcatgaaatgatatgaatgataaattataaaatacaataatatataattcaaatttatgacaataaaaatgagataattttgtgtctcttttataaagaattggttttttaaatgcatattcataaaagataaaaataaatatatagaaaacaaaagtaactagatacgatattagatcaatttgtttttgttacaatattagatcaatttaatgaagatagaaccgtatgtcaaatagttcatgcattcactgatagaaatcagaattatttttagttaattggcaatgtaaaaattgatgttgtgttatagtttttatctttaaatcagaagtatttttttttattaaagataatctacttgttcaatagaaatagaattattatagatgataattttttgtataaatatttaatataattatatatttaagattcaaatttaaaacttccaattaaactaaaataagattacattgattgatcgatagacttagtgttttatggtgtgatagttagacaagatcatatcgatgcaagtgaacagtgtgagctaggtttgtatgatggctatgataatgacgaattaggtttggtcactagctacaactactagtcaagcagtgcccgctatcaatggagaacctgttactccaaactacctgcgatactttatgtttgaaagaaaacaaaaatattgatcctactgggtcctcatacagaaactatctcatgctgaaaattacgaaattttaagaaattcaaatgaaaaatatagtgaacaataaaattttttaaaaaatcataaacaacataattttatacatttcaatgaaaattattttcattttacttttttaataaatgtcctcaccagttaacatgcatttggctaataataatggacagtgaagctacgtttcttattttcgacaaaatttaattagttctactgatctttttggtcaagctactattgaatatatatatatatatatatatatattaaattttccttttgggaaaaattaacaaatatcttttacattatgctggatatttttaatttaattaaaaatttaaaatacaacataaatgttatttacaacaaaaggaaagataaatttaaagtataataaatgatatgatggttagaaatagataaataaattaacgttgtctgaattatatgaattgttgtaagagtgtcatatttctatcatatataattttatcaacttacattctaaaaaaaaattatttactatgctctgaaaataagttggaaaaaaatatctaatcagttcgtactttattcatttttcatgatcaagtgaaaaaaaattaataatattggatgccccatagtgtgcaactacagaccttcagtttgcaagactgaagtctctacgtaccattgagctacagaggcaagaacattctgaatcaaaaattgatttttcaattggttcttcctttcctcccttatactctcctcttttcataaaaaaaaggttagactcaataattttcatctttatgtttacaataatattttgttttatgtttttaatactaacctagagtctacagatcaaagttgctgaaaattatgttcattctcattcttggcgctgttagtctagtgtgaaaacggacaaattcagtttcctgttatatatggcactctatataaaaaggaaataaaaaaaaagtagaatttgattatggctaagaatgcttgggccatgatcattcaaaaatacccttaattgatctttagctcaacattttgtataatacgttaattaattttttaaaattatgattactatcaattatataattcttaaaactgttaaacaaaagacattttgtttatttgttgatatttttataaggttaaaatatatttttaatcttataaatattaaaagttacacctattatttgccctttttatagttagggtaatttagaatattactccaacaattttgttggttctcaagcatcattggttatctatggatatctcatcaaagttcttggcctggccggcttggagagtcaagtcttgtatgcagccacgagtcacgactttaattaacacgaaagaactaattattcacttcaatggttagtgactaaaattaaatataagtttttttcctattaaaccacgttttcttgaaccactagtcccccatttttggaaacaagaatgtgatacacagaattgaacaactagttgatcttaactacaaatatgctcaatatgcaaatatgtacatcccaaaacagaatttaaataagactctcaaatttataaaaaaaaaaaaagaagaaagaagatagcaataactacaatgcaaattgaacaacctggcaatacaatgatacaacatcggttgtaagcaacactaaacagtgatactatatgaggaaaaagattgaagtttgaaccacacatgatcaaggaaatgaaaatagacatgccgccatgatctacaaatcagcaaaggagcaatcactatccaaagtcccacaacaaatccaattgtcacactaacaaaaaaccaattcactccatgcccatgacttccttcataactatgagttttcccattggagctgcagtttatgggcagtggtggaccacatagattgttgccaataaagctggaggcatcaaaggtttgcaattgagttcctgttggaatttttcccttcaaatgattataagacacgtctagcatgctcaaaaagctcaaattagaaatggttggagggatttcaccagaaatttgattcctcgaaaaatcaatggtttgtaacgatcccatattaccaataccttctggaataggaccaatcaattggttgtgggacaagttcaaaaagttcaatccatttagatctgtgatttctctaggaatttctcctaataatttgttacttgacagatcaatacttgttaccaaacccagaatgtttccatactcatctcctcttccttttagccatagtagcacactaactatacctgataccgaagagtattctgtattatttggtgcatgagaatagatttggggatatggactccggttcactagtgtcatggcactcaagttacggaaacagctgggtatattgccagacaaattattttttgcaaggtctaaaacctgaagaagactcatctgacatatttcatttggaatgtgaccggtaaaactgtttgatcgaaggcggaggattttcatatttgagagcttttctccaacccatgttggaatacatcctgaaagattattttctccaagatccaaggatatcaattggcgagtcttcttcaaactggtaggaaatattcccgagagcaagttgttacgaatttctaatgactgcagctcagccaaggaacccatggatggggggaagttcccaacaaaatggttgctttgtaaattcacttccactagaaatggccaattaatccaacaatcaggtatttctcctgacagattatttgatgcaagattgagaatttctaattgcattggcttgtccagattgttacataaaaaatcttgcatggattcagagaatgaattggttgaaaggtctaagtcatacacatcatttgaaagatagggtaatttaccacataagtgatttgtgcttagatcaacagtttggatagatattggattttgtaatgtagtcacaagctcaccatggatatgattatgagagaggtttaaatacaaaacctgagagtgtggttcccagaaccaagtgggaatagaatctaaaatccccgtgttagacagtccaacatattgaagtttgttttgtgactgaatccacgatggaaagttgggacctatatgccatgatgtcacatccaaataggtaagttgaaaattaggaatccaattaggacccacttttaaagtgaaattgttccctgatgcatcaaactccttcaagcttgtaagatttgcaagatcatcttcgttgacaactccttgaaaattattgccatcaataagaagcgttgacaatttagagagtgatccaagactttcaaatggatttccgctgaatttattaatagagagatagagatattttaaatctatctcccataagttgcggagattacccaaaaaagtcggaattgttccttcaagttgattacgtgataaatcaagttcaacaagagaagtcaaatttcccaaagaagttggaatggttccttcaagttgattatatgacaaataaagtccaacaagagaagtcaaatttcccaaagaagttggaatggttccttcaagttgattatatgacaaatcaagttcaacaagagaagtcaaatttcccagggcatcagaaatagtcccatgcaagttgctggaacttaggtccaaagacttgagacgatgaaaaccgtataagcaatcaggtatagaagatgagaatgaattgaaagacaagtcaagattttgaagaagtgtgaggtttcgaataccaccaggaatcggaccatgaatttcattaccctgtaattgaagagaaacaagtttcttcaatttgaatatccacttggggacaaaagaaatggcaggggaataactagtagcggaaagatggagagtttgcagagatgagaagttgagcaaggatggttcattatagtgagggagtgtgcagtgtgacaaagataggtgggtcaaagaaggaagagattggagagtgtgtagccaatgaaatgctttggataggtttgcataactcaaatcaagatattcaagcttcgacatacttgatacccattctacattttcagctaacagaggttcaggactagaatcacctccaaggccaagatagagcaaattggagagattcccaatctgaggaggaatcttcccatagaatccagtataagagaggtcgaggtgagtcatggaagtcattgtcccaaggaaagaaggaattgacataccttctccaaggaaataattgtggctcaagtcaagatatcgaagcttagagagattcccgatcggagagggtactcttccgttggcaaaaacataactcaggtcaagatacaccaaatttgagagattcccaatctgaggaggaatcttcccatagaatccagtagcagagaggttaaggtgagtcaaggaggtcattgtcccaaggaaagaaggaattgacataccttctctaaggaatacattgccgctcaagtccaagtaattcaaatgctttaaatcagccaaacaaggacttatctctccaccaaagctccatctcctataagcttcctcatcgaagtgagggtagccatcaaactcgaaagcaggaactgtagtgttgaggtgaagctgaagaagatgggaagtaaggttgtggcagaggactccataccagtggcaacagttggtatgattaggattccaagaccaaagcctattggaaggatctatgagattattcttaaacttcaaaagtgtctcacgctcacttgggatgcacacactctctctgcatggtaagcttaacaacaaaaggtggacaaagacaagaatataaatggaggaattcatgatcacacaagaatatatagaaaacaagtgtagttgttggttctgcatataaatcatcaaacttctattatttatactgctgccctgcctgtttttttcttcactttcattattttttaccttttttattattgtgccaaatactaaaatattcttccattctttttttacgctggcctctttaaattatcgatttaattatccaattctcccgaattaattcttagaatacgaatttttttgtatttactgtatctatctccctttttaaaattcctatatacactaaattcttttaggtacagtttttttttacaaaaataaataagaattattttattttaatttactctataatactgcttaaatgaaaatttggtgtcattaaacttcaaattttaactattatttaatcaatccttccgttaaacttttgttacgtacaaaagtccaacatttttttaagaaaaaaatcaagtcttttatttcatcaaatttaatattaaattatcaaattttcaatattcaaactaaaaataatgtaaaagaaaattgtcttctaaatcatagcttacaccatcaagtcaatctcaaggttttccattttttcatcttgaacctttggacactccacaaagtccagccatgatgttaaggtctgacttcttcaacttgaaccataggtcactgcattaccttcatatcaagtttcctgtcattgacaacaaatgttgcgagttaagtcaagcaaggaaaaaaaaatattattgatgaataaatcaattataggaaaagagtttactttaaagactattttggttaaaaaaatctataaaaaaaattatttcattccaagctagctatttaattttgatcaatttttcaattcacaaaataatattcttcttatatgtgaaaaagactaattaatcttcattgtcattaatgattgttgtgttgtctatttctaattgtttttttaatcataatattattttctttttattaaaaattaattagtgagatacaaagaagtttaacttgatctatcataattattgagatcatagtttttccttttataagtcttggtccaaatttctccatgtattgtaaatcatatttaacttaaaaagtaaattagaagatctacaaagaagtgtgacatgttttttaaattataaaattatggtcctagctatttattgttagaccacaagtcttcatatattaaagtttttgtctaaatttcatttatggtgatagtttaagaatagtgatagaagacaaaaataaatattcaatttattgaaatatctaactcaattaattgatgaatacatcaattataggaaaagggtgtactttaaagactatttctattaaaaaatctataaaaaaattatttccttccaatctaattatttaattttaatcaatttttcagttcacaaaataatattctcttatataggaaaaaaagactagatttaattatcatcaattggaaaagttattgtgtcatgtatttataattgtattctaacttgaatattattttatttatcatataaaaattaattagttatataaaagaagtaaaaagaatattaacttttttttctcaaaaaaaaaagtcagtatcatattttatgttttttacaagttatcaacttaaataagaggataaacataattttaatttccattttactttttaaataattgcaagtgccaaatttaaataatcatgagaatactcatgtttaatataatattctaaaagaaaaatccatacaataacttaaacaatctacaaagaaatataatttattcttgtgctaaatactaaaacaagaaacatttttttattttagtttaccgtatagaattgcttaaatcaattaaatttttattttaagaaaatattaatgatttttttaaaactttaagtagtttacatcaaagataattaaatttggcttaattagtcttcaaattttaactattattcaaatcaaacctttcgttaaacctgtacgtattaagtaaacaacaaaaagtcttgccttataaaattcaaatattctattacatgcggtttgaacccataattaattttaaactatcaaattttaattattcaaaataaaagaaatgaaaacaaaattgtctactagagaaaccgctggccactccaccaaatccatatcaaggtccccacttttccaacttgaaccatagactactccatcaagtccatgtcaagttcttccattttttcatcttgaaccttaggacactccacaaagtccacccatattaaggtctctgacttcttcaacttctgcaacgcatatataggaaacaacttaattgtataagtgcttcttgtttctgcatataaatcataaaacttctattatttatactgctgcaagtgtctttcttttcttttttcttttttttatgacgtttcctttttttaattattgactttattatccaattcccccgagttaattcttggaataggaaataattttgaatttactttatctatctccctttttaaaattcctatatacacaaaattttgtattgaatttaacgattatttaattttgattaatcaatcctttcgttaaaattttgttaattaaacaataaaagtccaacattttattaaaaaaattcaagtcttctatttctaattgtatttgaacttgaatattatttttttatcatataaaaattaattagttatgtaaaaagaagtgtgaaaaagactattaacttttttctccaagaaatcagtatcatattttatattttttataagttatcaacttaaataagaggagaaacattattttaatttccattttactttttaaataattttcaagtgtcaaacttaaacaatcataaaaatactcacgttcaatataatattctcaaaaagaaaaatattgatacgataacttaaaaaatcaacaaagaaatataatttattcttgtgccaaatactaaaataggaaactttttttattttagtttaccgtatagaattgcttaaatcaatgaaagttttattttaagaaaatattaacaattttttaaaactttgagtagttgacatctaaggtaattaaatttagcttaattagtcttcaaattttaactattatttaaatcaatcctctaagtattctattatttggaatttgaacccataattaattttaaactatcaaaattttattattcaaaattaaaaaaatgaaaaacaaaattttctcctagacaaatcgctggctactccaccaaatccatatcaaggtccccactttttcaacttgaaccataggctactccatcaagtccatgtcaagctcctcgattttttcatcttgaaccttaggacactccacaaagtccagccatactaaggtctctgacttcttcaacttgatccatatcccataggccactccaccaatttcatgacaatgtccccccacttcttcaacttgaaccataggtcactacattaccttcatatcaagttctttatcattgacaacaaatgtttagaattaagtaaggaaggaaaaaattataaatgatgaatacatcaattataggaaaagaatctaatttagagactatttagattaaaaaattatataaaaaaagattattttgctccaatttagttagttaattttgatttattttttaaacttcttatatgtaaaaaaagactaattttcattgttattaattgtaaagattgttgtgtcgtttatttttaatcgtattttaacctaaatattattttctttttcattaaaagttaattagtgagatataaagaagtgtaaattgcttgtttaacttggtctatcataattattgagatcatagttttttctttaataagtcttggtccaaatttctccatgtattaaaaagtaaattagaagatctacaaattaagaagtgtggcatgtttttttaaattataaaattatggtcctagctatttattgttagaccacaagtcttcatatattaaagtttttgtctaaatttcatttacttatgtggtgatagtttaagaatagtgatagaagagaaaaataaatatacaatttattgaaatatttaactcccttgtgcgaattagtcaaactcccttgtcactaggtccatctagtgattaaaaatataatcaaacaattcaataaaacacaagtctaattgtcgctattgtaattcaataattgtattatattttttttgttgataaattttttaaaaaaggttggtgtttttagtagaatgaaagcaattaatacattgatttcaatgcattaattgaattctgatttgacttttaattaaaaaactgcacataaatgtttttaaaactattgtgtggtttccctggaaaaaaaactattgtatggttctattataattgactaaatttgagtttgaaaagatttttttgtgaaattaaaattaaagataaaaaatataaaagtttaattgcattctttattcttcaggtacagtaattgtgcgattttggtctattgtaagtccaattgggagaattggattggatccactaggcattgcaatttcaatccctccatccatctttctttgaatatttaacagatatttactggcatgacactagatgaaaggtagataatatgacaactaccatgttgcctaacacatactgaactaaacttttgatcccttagaatattgcagttataaggaagcagaagtgaataagccacatgtaagggaccaaattaaacttacaaaattataatacctaatttacgtaatgcatggagatcaaaagtgaaaataggtagggtggatgaagaactagacatcggccagtggaagaaaatgaacagatggaaaaccatctttttgggtatttccctatttcttttataaagatacactggtgatacaggtgtgatggaaaccctatatctgatagcttgaaactttattttgtatgagggaattcaatacaactagtgacccttgtataaaacgataggaactattatgaataaaaaagtaatatttcatgatttttaaaatttaatcaatcatgatttgtcaaatgaacttgttaatgagtattatagaataaatgcatcaatactcaggaaatgggaatgtggagtgtatcagagtaaggaaaagcgagagaaggaagatgtggaagagcttagaaactgcagaatcctatgcaagctccaactttctacactaattaaattcattcaggcaaattcttagttacatgttgtgtaaaacaatcttcttgagaacattgttagtgcacagatagtagaagacaataatgcgtcataaatacaaaacagaatttgatactcaagtctcaagctcgtctagttctcttaacattaagaacatttaataccaatgaaagcaaaaccgacggaacaccacagatgaacaggtacatagtatggtaaaccttttcacatttttaatggctagaccaacacgttgtaatgtctcacttcttaacagttaacaggtaaactcataatttcccaagtaaccttcttaccttcaaaactatcatcacataaatcagatctctcaagtggtcaagataatgaaaataagcacgcctccaagttctgttgaagaaaacaacactgccaaaaccccaaaatcctgctgcaaatccaactcccataccgatatcaaactctgatgttccaaagaaattaccatcaccgtgtccaacagaagcactctccctcaaccattccttgtttgtgcaattttttgtcacaggaggaccacaaagctcaggatttccagtgtagctaagttcttcaaagctctgaagttgggtgctcgtgggaattctgcctgataagttgtgtcaaataggactaatcgtagaagggttagcatttaaaattttactccactaatggtggtggttgcaaaatgcacacatatgtagaggaatatatgtcaacaacgagacatttaggattaaaagtgtctaaccacaccaccattattttgcaatagtttattttattttgatttgattactcttttagtccttatagttgtgataattttttttagttcctataatttaagacattcattttggttcctatattttcattttttttacctttttgtcctcgcggggaagattcaactcacacataaacatgaacaaaattaataaaaatagggaatcaagctcaggtacaactgaagtgtaatggaggtatgagacaaaggcactacacattccattattcttgagtctgccaccgacctctgaaagcttagcatttgccaattgccatgatgtaatctccttctttactgtgtctcatcaagttggagtggtatcatagcattgaactaagttgatcgttccaatgggatgatggttttgattgctgcagataaagtgtgtgattgtgagtttctggttccatgagtaacagatcgaggtgtggtagtttgtgccttcatggttgggatgatgtttcaggtgccggtttgttgttgagagaaaagatgatcagccatgtctcgtgtgtgcataggagagtgtctttgccctctccataacattagtttcaacaattgactttagtcgaaacttgatggtgagaatcgaagagtcaaaaaaaaaataaaaaaattcaaccgggactataatagaatgatttaaactataagaactaaaaagaaatattgtcgtaactttacaaaaggataattaaaccttttatttttcttgtaaaaacaggtttggaatttgcaactttgaattctatctaattaagctctcagtcttccgtttttgcaactctatttgggtagaaagagaagaaatctgggcctaactcaaccctaaaagctagttcatagggtgaggattgccctcaccttataaactctatcttaagactatctctaaccaatgtgagacttgaattttttttttttaattcatccctcacgtttaacactctttgggcatggtgcgtaatccttttgaatggctctaggataccttctgataccaagaagaaatatgggcctaacggaaagaaaccaagtttgaagatacaacatttgatactataactgtttggtgttttgaaaatctcactcacatatttccaaatgttacagaagactttgattcagtggttattacgaattccttcctagccttttttaccaagtcagggaatttgcattgttgtgcatgttggctgccacaaggacccttgtaccaacccattagtgcaagtggtttttttcttaggagaattgagaaacaaatgatgtgttttataaaaggaattcttttgctttgaattttgaacttataatgttttttgtttccctcacagaacaagtgatgaaactcttgacgccatacgtacgcctactttgatgctctttttttcattccacttttatcttaatggtatctcaagttaattagaatgtacgtataataaaataatgagaatggcaactactagtagtacttaattagaaaaaaaactatcaaaactaaaacgacaaannnnnnnnnnnnnnnnnnnnnnnnnnnnnnnnnnnnnnnnnnnnnnnnnnnnnnnnnnnnnnnnnnnnnnnnnnnnnnnnnnnnnnnnnnnnnnnnnnnnnnnnnnnnnnnnnnnnnnnnnnnnnnnnnnnnnnnnnnnnnnnnnnnnnnnnnnnnnnnnnnnnnnnnnnnnnnnnnnnnnnnnnnnnnnnnnnnnnnnnnnnnnnnnnnnnnnnnnnnnnnnnnnnnnnnnnnnnnnnnnnnnnnnnnnnnnnnnnnnnnnnnnnnnnnnnnnnnnnnnnnnnnnnnnnnnnnnnnnnnnnnnnnnnnnnnnnnnnnnnnnnnnnnnnnnnnnnnnnnnnnnnnnnnnnnnnnnnnnnnnnnnnnnnnnnnnnnnnnnnnnnnnnnnnnnnnnnnnnnnnnnnnnnnnnnnnnnnnnnnnnnnnnnnnnnnnnnnnnnnnnnnnnnnnnnnnnnnnnnnnnnnnnnnnnnnnnnnnnnnnnnnnnnnnnnnnnnnnnnnnnnnnnnnnnnnnnnnnnnnnnnnnnnnnnnnnnnnnnnnnnnnnnnnnnnnnnnnnnnnnnnnnnnnnnnnnnnnnnnnnnnnnnnnnnnnnnnnnnnnnnnnnnnnnnnnnnnnnnnnnnnnnnnnnnnnnnnnnnnnnnnnnnnnnnnnnnnnnnnnnnnnnnnnnnnnnnnnnnnnnnnnnnnnnnnnnnnnnnnnnnnnnnnnnnnnnnnnnnnnnnnnnnnnnnnnnnnnnnnnnnnnnnnnnnnnnnnnnnnnnnnnnnnnnnnnnnnnnnnnnnnnnnnnnnnnnnnnnnnnnnnnnnnnnnnnnnnnnnnnnnnnnnnnnnnnnnnnnnnnnnnnnnnnnnnnnnnnnnnnnnnnnnnnnnnnnnnnnnnnnnnnnnnnnnnnnnnnnnnnnnnnnnnnnnnnnnnnnnnnnnnnnnnnnnnnnnnnnnnnnnnnnnnnnnnnnnnnnnnnnnnnnnnnnnnnnnnnnnnnnnnnnnnnnnnnnnnnnnnnnnnnnnnnnnnnnnnnnnnnnnnnnnnnnnnnnnnnnnnnnnnnnnnnnnnnnnnnnnnnnnnnnnnnnnnnnnnnnnnnnnnnnnnnnnnnnnnnnnnnnnnnnnnnnnnnnnnnnnnnnnnnnnnnnnnnnnnnnnnnnnnnnnnnnnnnnnnnnnnnnnnnnnnnnnnnnnnnnnnnnnnnnnnnnnnnnnnnnnnnnnnnnnnnnnnnnnnnnnnnnnnnnnnnnnnnnnnnnnnnnnnnnnnnnnnnnnnnnnnnnnnnnnnnnnnnnnnnnnnnnnnnnnnnnnnnnnnnnnnnnnnnnnnnnnnnnnnnnnnnnnnnnnnnnnnnnnnnnnnnnnnnnnnnnnnnnnnnnnnnnnnnnnnnnnnnnnnnnnnnnnnnnnnnnnnnnnnnnnnnnnnnnnnnnnnnnnnnnnnnnnnnnnnnnnnnnnnnnnnnnnnnnnnnnnnnnnnnnnnnnnnnnnnnnnnnnnnnnnnnnnnnnnnnnnnnnnnnnnnnnnnnnnnnnnnnnnnnnnnnnnnnnnnnnnnnnnnnnnnnnnnnnnnnnnnnnnnnnnnnnnnnnnnnnnnnnnnnnnnnnnnnnnnnnnnnnnnnnnnnnnnnnnnnnnnnnnnnnnnnnnnnnnnnnnnnnnnnnnnnnnnnnnnnnnnnnnnnnnnnnnnnnnnnnnnnnnnnnnnnnnnnnnnnnnnnnnnnnnnnnnnnnnnnnnnnnnnnnnnnnnnnnnnnnnnnnnnnnnnnnnnnnnnnnnnnnnnnnnnnnnnnnnnnnnnnnnnnnnnnnnnnnnnnnnnnnnnnnnnnnnnnnnnnnnnnnnnnnnnnnnnnnnnnnnnnnnnnnnnnnnnnnnnnnnnnnnnnnnnnnnnnnnnnnnnnnnnnnnnnnnnnnnnnnnnnnnnnnnnnnnnnnnnnnnnnnnnnnnnnnnnnnnnnnnnnnnnnnnnnnnnnnnnnnnnnnnnnnnnnnnnnnnnnnnnnnnnnnnnnnnnnnnnnnnnnnnnnnnnnnnnnnnnnnnnnnnnnnnnnnnnnnnnnnnnnnnnnnnnnnnnnnnnnnnnnnnnnnnnnnnnnnnnnnnnnnnnnnnnnnnnnnnnnnnnnnnnnnnnnnnnnnnnnnnnnnnnnnnnnnnnnnnnnnnnnnnnnnnnnnnnnnnnnnnnnnnnnnnnnnnnnnnnnnnnnnnnnnnnnnnnnnnnnnnnnnnnnnnnnnnnnnnnnnnnnnnnnnnnnnnnnnnnnnnnnnnnnnnnnnnnnnnnnnnnnnnnnnnnnnnnnnnnnnnnnnnnnnnnnnnnnnnnnnnnnnnnnnnnnnnnnnnnnnnnnnnnnnnnnnnnnnnnnnnnnnnnnnnnnnnnnnnnnnnnnnnnnnnnnnnnnnnnnnnnnnnnnnnnnnnnnnnnnnnnnnnnnnnnnnnnnnnnnnnnnnnnnnnnnnnnnnnnnnnnnnnnnnnnnnnnnnnnnnnnnnnnnnnnnnnnnnnnnnnnnnnnnnnnnnnnnnnnnnnnnnnnnnnnnnnnnnnnnnnnnnnnnnnnnnnnnnnnnnnnnnnnnnnnnnnnnnnnnnnnnnnnnnnnnnnnnnnnnnnnnnnnnnnnnnnnnnnnnnnnnnnnnnnnnnnnnnnnnnnnnnnnnnnnnnnnnnnnnnnnnnnnnnnnnnnnnnnnnnnnnnnnnnnnnnnnnnnnnnnnnnnnnnnnnnnnnnnnnnnnnnnnnnnnnnnnnnnnnnnnnnnnnnnnnnnnnnnnnnnnnnnnnnnnnnnnnnnnnnnnnnnnnnnnnnnnnnnnnnnnnnnnnnnnnnnnnnnnnnnnnnnnnnnnnnnnnnnnnnnnnnnnnnnnnnnnnnnnnnnnnnnnnnnnnnnnnnnnnnnnnnnnnnnnnnnnnnnnnnnnnnnnnnnnnnnnnnnnnnnnnnnnnnnnnnnnnnnnnnnnnnnnnnnnnnnnnnnnnnnnnnnnnnnnnnnnnnnnnnnnnnnnnnnnnnnnnnnnnnnnnnnnnnnnnnnnnnnnnnnnnnnnnnnnnnnnnnnnnnnnnnnnnnnnnnnnnnnnnnnnnnnnnnnnnnnnnnnnnnnnnnnnnnnnnnnnnnnnnnnnnnnnnnnnnnnnnnnnnnnnnnnnnnnnnnnnnnnnnnnnnnnnnnnnnnnnnnnnnnnnnnnnnnnnnnnnnnnnnnnnnnnnnnnnnnnnnnnnnnnnnnnnnnnnnnnnnnnnnnnnnnnnnnnnnnnnnnnnnnnnnnnnnnnnnnnnnnnnnnnnnnnnnnnnnnnnnnnnnnnnnnnnnnnnnnnnnnnnnnnnnnnnnnnnnnnnnnnnnnnnnnnnnnnnnnnnnnnnnnnnnnnnnnnnnnnnnnnnnnnnnnnnnnnnnnnnnnnnnnnnnnnnnnnnnnnnnnnnnnnnnnnnnnnnnnnnnnnnnnnnnnnnnnnnnnnnnnnnnnnnnnnnnnnnnnnnnnnnnnnnnnnnnnnnnnnnnnnnnnnnnnnnnnnnnnnnnnnnnnnnnnnnnnnnnnnnnnnnnnnnnnnnnnnnnnnnnnnnnnnnnnnnnnnnnnnnnnnnnnnnnnnnnnnnnnnnnnnnnnnnnnnnnnnnnnnnnnnnnnnnnnnnnnnnnnnnnnnnnnnnnnnnnnnnnnnnnnnnnnnnnnnnnnnnnnnnnnnnnnnnnnnnnnnnnnnnnnnnnnnnnnnnnnnnnnnnnnnnnnnnnnnnnnnnnnnnnnnnnnnnnnnnnnnnnnnnnnnnnnnnnnnnnnnnnnnnnnnnnnnnnnnnnnnnnnnnnnnnnnnnnnnnnnnnnnnnnnnnnnnnnnnnnnnnnnnnnnnnnnnnnnnnnnnnnnnnnnnnnnnnnnnnnnnnnnnnnnnnnnnnnnnnnnnnnnnnnnnnnnnnnnnnnnnnnnnnnnnnnnnnnnnnnnnnnnnnnnnnnnnnnnnnnnnnnnnnnnnnnnnnnnnnnnnnnnnnnnnnnnnnnnnnnnnnnnnnnnnnnnnnnnnnnnnnnnnnnnnnnnnnnnnnnnnnnnnnnnnnnnnnnnnnnnnnnnnnnnnnnnnnnnnnnnnnnnnnnnnnnnnnnnnnnnnnnnnnnnnnnnnnnnnnnnnnnnnnnnnnnnnnnnnnnnnnnnnnnnnnnnnnnnnnnnnnnnnnnnnnnnnnnnnnnnnnnnnnnnnnnnnnnnnnnnnnnnnnnnnnnnnnnnnnnnnnnnnnnnnnnnnnnnnnnnnnnnnnnnnnnnnnnnnnnnnnnnnnnnnnnnnnnnnnnnnnnnnnnnnnnnnnnnnnnnnnnnnnnnnnnnnnnnnnnnnnnnnnnnnnnnnnnnnnnnnnnnnnnnnnnnnnnnnnnnnnnnnnnnnnnnnnnnnnnnnnnnnnnnnnnnnnnnnnnnnnnnnnnnnnnnnnnnnnnnnnnnnnnnnnnnnnnnnnnnnnnnnnnnnnnnnnnnnnnnnnnnnnnnnnnnnnnnnnnnnnnnnnnnnnnnnnnnnnnnnnnnnnnnnnnnnnnnnnnnnnnnnnnnnnnnnnnnnnnnnnnnnnnnnnnnnnnnnnnnnnnnnnnnnnnnnnnnnnnnnnnnnnnnnnnnnnnnnnnnnnnnnnnnnnnnnnnnnnnnnnnnnnnnnnnnnnnnnnnnnnnnnnnnnnnnnnnnnnnnnnnnnnnnnnnnnnnnnnnnnnnnnnnnnnnnnnnnnnnnnnnnnnnnnnnnnnnnnnnnnnnnnnnnnnnnnnnnnnnnnnnnnnnnnnnnnnnnnnnnnnnnnnnnnnnnnnnnnnnnnnnnnnnnnnnnnnnnnnnnnnnnnnnnnnnnnnnnnnnnnnnnnnnnnnnnnnnnnnnnnnnnnnnnnnnnnnnnnnnnnnnnnnnnnnnnnnnnnnnnnnnnnnnnnnnnnnnnnnnnnnnnnnnnnnnnnnnnnnnnnnnnnnnnnnnnnnnnnnnnnnnnnnnnnnnnnnnnnnnnnnnnnnnnnnnnnnnnnnnnnnnnnnnnnnnnnnnnnnnnnnnnnnnnnnnnnnnnnnnnnnnnnnnnnnnnnnnnnnnnnnnnnnnnnnnnnnnnnnnnnnnnnnnnnnnnnnnnnnnnnnnnnnnnnnnnnnnnnnnnnnnnnnnnnnnnnnnnnnnnnnnnnnnnnnnnnnnnnnnnnnnnnnnnnnnnnnnnnnnnnnnnnnnnnnnnnnnnnnnnnnnnnnnnnnnnnnnnnnnnnnnnnnnnnnnnnnnnnnnnnnnnnnnnnnnnnnnnnnnnnnnnnnnnnnnnnnnnnnnnnnnnnnnnnnnnnnnnnnnnnnnnnnnnnnnnnnnnnnnnnnnnnnnnnnnnnnnnnnnnnnnnnnnnnnnnnnnnnnnnnnnnnnnnnnnnnnnnnnnnnnnnnnnnnnnnnnnnnnnnnnnnnnnnnnnnnnnnnnnnnnnnnnnnnnnnnnnnnnnnnnnnnnnnnnnnnnnnnnnnnnnnnnnnnnnnnnnnnnnnnnnnnnnnnnnnnnnnnnnnnnnnnnnnnnnnnnnnnnnnnnnnnnnnnnnnnnnnnnnnnnnnnnnnnnnnnnnnnnnnnnnnnnnnnnnnnnnnnnnnnnnnnnnnnnnnnnnnnnnnnnnnnnnnnnnnnnnnnnnnnnnnnnnnnnnnnnnnnnnnnnnnnnnnnnnnnnnnnnnnnnnnnnnnnnnnnnnnnnnnnnnnnnnnnnnnnnnnnnnnnnnnnnnnnnnnnnnnnnnnnnnnnnnnnnnnnnnnnnnnnnnnnnnnnnnnnnnnnnnnnnnnnnnnnnnnnnnnnnnnnnnnnnnnnnnnnnnnnnnnnnnnnnnnnnnnnnnnnnnnnnnnnnnnnnnnnnnnnnnnnnnnnnnnnnnnnnnnnnnnnnnnnnnnnnnnnnnnnnnnnnnnnnnnnnnnnnnnnnnnnnnnnnnnnnnnnnnnnnnnnnnnnnnnnnnnnnnnnnnnnnnnnnnnnnnnnnnnnnnnnnnnnnnnnnnnnnnnnnnnnnnnnnnnnnnnnnnnnnnnnnnnnnnnnnnnnnnnnnnnnnnnnnnnnnnnnnnnnnnnnnnnnnnnnnnnnnnnnnnnnnnnnnnnnnnnnnnnnnnnnnnnnnnnnnnnnnnnnnnnnnnnnnnnnnnnnnnnnnnnnnnnnnnnnnnnnnnnnnnnnnnnnnnnnnnnnnnnnnnnnnnnnnnnnnnnnnnnnnnnnnnnnnnnnnnnnnnnnnnnnnnnnnnnnnnnnnnnnnnnnnnnnnnnnnnnnnnnnnnnnnnnnnnnnnnnnnnnnnnnnnnnnnnnnnnnnnnnnnnnnnnnnnnnnnnnnnnnnnnnnnnnnnnnnnnnnnnnnnnnnnnnnnnnnnnnnnnnnnnnnnnnnnnnnnnnnnnnnnnnnnnnnnnnnnnnnnnnnnnnnnnnnnnnnnnnnnnnnnnnnnnnnnnnnnnnnnnnnnnnnnnnnnnnnnnnnnnnnnnnnnnnnnnnnnnnnnnnnnnnnnnnnnnnnnnnnnnnnnnnnnnnnnnnnnnnnnnnnnnnnnnnnnnnnnnnnnnnnnnnnnnnnnnnnnnnnnnnnnnnnnnnnnnnnnnnnnnnnnnnnnnnnnnnnnnnnnnnnnnnnnnnnnnnnnnnnnnnnnnnnnnnnnnnnnnnnnnnnnnnnnnnnnnnnnnnnnnnnnnnnnnnnnnnnnnnnnnnnnnnnnnnnnnnnnnnnnnnnnnnnnnnnnnnnnnnnnnnnnnnnnnnnnnnnnnnnnnnnnnnnnnnnnnnnnnnnnnnnnnnnnnnnnnnnnnnnnnnnnnnnnnnnnnnnnnnnnnnnnnnnnnnnnnnnnnnnnnnnnnnnnnnnnnnnnnnnnnnnnnnnnnnnnnnnnnnnnnnnnnnnnnnnnnnnnnnnnnnnnnnnnnnnnnnnnnnnnnnnnnnnnnnnnnnnnnnnnnnnnnnnnnnnnnnnnnnnnnnnnnnnnnnnnnnnnnnnnnnnnnnnnnnnnnnnnnnnnnnnnnnnnnnnnnnnnnnnnnnnnnnnnnnnnnnnnnnnnnnnnnnnnnnnnnnnnnnnnnnnnnnnnnnnnnnnnnnnnnnnnnnnnnnnnnnnnnnnnnnnnnnnnnnnnnnnnnnnnnnnnnnnnnnnnnnnnnnnnnnnnnnnnnnnnnnnnnnnnnnnnnnnnnnnnnnnnnnnnnnnnnnnnnnnnnnnnnnnnnnnnnnnnnnnnnnnnnnnnnnnnnnnnnnnnnnnnnnnnnnnnnnnnnnnnnnnnnnnnnnnnnnnnnnnnnnnnnnnnnnnnnnnnnnnnnnnnnnnnnnnnnnnnnnnnnnnnnnnnnnnnnnnnnnnnnnnnnnnnnnnnnnnnnnnnnnnnnnnnnnnnnnnnnnnnnnnnnnnnnnnnnnnnnnnnnnnnnnnnnnnnnnnnnnnnnnnnnnnnnnnnnnnnnnnnnnnnnnnnnnnnnnnnnnnnnnnnnnnnnnnnnnnnnnnnnnnnnnnnnnnnnnnnnnnnnnnnnnnnnnnnnnnnnnnnnnnnnnnnnnnnnnnnnnnnnnnnnnnnnnnnnnnnnnnnnnnnnnnnnnnnnnnnnnnnnnnnnnnnnnnnnnnnnnnnnnnnnnnnnnnnnnnnnnnnnnnnnnnnnnnnnnnnnnnnnnnnnnnnnnnnnnnnnnnnnnnnnnnnnnnnnnnnnnnnnnnnnnnnnnnnnnnnnnnnnnnnnnnnnnnnnnnnnnnnnnnnnnnnnnnnnnnnnnnnnnnnnnnnnnnnnnnnnnnnnnnnnnnnnnnnnnnnnnnnnnnnnnnnnnnnnnnnnnnnnnnnnnnnnnnnnnnnnnnnnnnnnnnnnnnnnnnnnnnnnnnnnnnnnnnnnnnnnnnnnnnnnnnnnnnnnnnnnnnnnnnnnnnnnnnnnnnnnnnnnnnnnnnnnnnnnnnnnnnnnnnnnnnnnnnnnnnnnnnnnnnnnnnnnnnnnnnnnnnnnnnnnnnnnnnnnnnnnnnnnnnnnnnnnnnnnnnnnnnnnnnnnnnnnnnnnnnnnnnnnnnnnnnnnnnnnnnnnnnnnnnnnnnnnnnnnnnnnnnnnnnnnnnnnnnnnnnnnnnnnnnnnnnnnnnnnnnnnnnnnnnnnnnnnnnnnnnnnnnnnnnnnnnnnnnnnnnnnnnnnnnnnnnnnnnnnnnnnnnnnnnnnnnnnnnnnnnnnnnnnnnnnnnnnnnnnnnnnnnnnnnnnnnnnnnnnnnnnnnnnnnnnnnnnnnnnnnnnnnnnnnnnnnnnnnnnnnnnnnnnnnnnnnnnnnnnnnnnnnnnnnnnnnnnnnnnnnnnnnnnnnnnnnnnnnnnnnnnnnnnnnnnnnnnnnnnnnnnnnnnnnnnnnnnnnnnnnnnnnnnnnnnnnnnnnnnnnnnnnnnnnnnnnnnnnnnnnnnnnnnnnnnnnnnnnnnnnnnnnnnnnnnnnnnnnnnnnnnnnnnnnnnnnnnnnnnnnnnnnnnnnnnnnnnnnnnnnnnnnnnnnnnnnnnnnnnnnnnnnnnnnnnnnnnnnnnnnnnnnnnnnnnnnnnnnnnnnnnnnnnnnnnnnnnnnnnnnnnnnnnnnnnnnnnnnnnnnnnnnnnnnnnnnnnnnnnnnnnnnnnnnnnnnnnnnnnnnnnnnnnnnnnnnnnnnnnnnnnnnnnnnnnnnnnnnnnnnnnnnnnnnnnnnnnnnnnnnnnnnnnnnnnnnnnnnnnnnnnnnnnnnnnnnnnnnnnnnnnnnnnnnnnnnnnnnnnnnnnnnnnnnnnnnnnnnnnnnnnnnnnnnnnnnnnnnnnnnnnnnnnnnnnnnnnnnnnnnnnnnnnnnnnnnnnnnnnnnnnnnnnnnnnnnnnnnnnnnnnnnnnnnnnnnnnnnnnnnnnnnnnnnnnnnnnnnnnnnnnnnnnnnnnnnnnnnnnnnnnnnnnnnnnnnnnnnnnnnnnnnnnnnnnnnnnnnnnnnnnnnnnnnnnnnnnnnnnnnnnnnnnnnnnnnnnnnnnnnnnnnnnnnnnnnnnnnnnnnnnnnnnnnnnnnnnnnnnnnnnnnnnnnnnnnnnnnnnnnnnnnnnnnnnnnnnnnnnnnnnnnnnnnnnnnnnnnnnnnnnnnnnnnnnnnnnnnnnnnnnnnnnnnnnnnnnnnnnnnnnnnnnnnnnnnnnnnnnnnnnnnnnnnnnnnnnnnnnnnnnnnnnnnnnnnnnnnnnnnnnnnnnnnnnnnnnnnnnnnnnnnnnnnnnnnnnnnnnnnnnnnnnnnnnnnnnnnnnnnnnnnnnnnnnnnnnnnnnnnnnnnnnnnnnnnnnnnnnnnnnnnnnnnnnnnnnnnnnnnnnnnnnnnnnnnnnnnnnnnnnnnnnnnnnnnnnnnnnnnnnnnnnnnnnnnnnnnnnnnnnnnnnnnnnnnnnnnnnnnnnnnnnnnnnnnnnnnnnnnnnnnnnnnnnnnnnnnnnnnnnnnnnnnnnnnnnnnnnnnnnnnnnnnnnnnnnnnnnnnnnnnnnnnnnnnnnnnnnnnnnnnnnnnnnnnnnnnnnnnnnnnnnnnnnnnnnnnnnnnnnnnnnnnnnnnnnnnnnnnnnnnnnnnnnnnnnnnnnnnnnnnnnnnnnnnnnnnnnnnnnnnnnnnnnnnnnnnnnnnnnnnnnnnnnnnnnnnnnnnnnnnnnnnnnnnnnnnnnnnnnnnnnnnnnnnnnnnnnnnnnnnnnnnnnnnnnnnnnnnnnnnnnnnnnnnnnnnnnnnnnnnnnnnnnnnnnnnnnnnnnnnnnnnnnnnnnnnnnnnnnnnnnnnnnnnnnnnnnnnnnnnnnnnnnnnnnnnnnnnnnnnnnnnnnnnnnnnnnnnnnnnnnnnnnnnnnnnnnnnnnnnnnnnnnnnnnnnnnnnnnnnnnnnnnnnnnnnnnnnnnnnnnnnnnnnnnnnnnnnnnnnnnnnnnnnnnnnnnnnnnnnnnnnnnnnnnnnnnnnnnnnnnnnnnnnnnnnnnnnnnnnnnnnnnnnnnnnnnnnnnnnnnnnnnnnnnnnnnnnnnnnnnnnnnnnnnnnnnnnnnnnnnnnnnnnnnnnnnnnnnnnnnnnnnnnnnnnnnnnnnnnnnnnnnnnnnnnnnnnnnnnnnnnnnnnnnnnnnnnnnnnnnnnnnnnnnnnnnnnnnnnnnnnnnnnnnnnnnnnnnnnnnnnnnnnnnnnnnnnnnnnnnnnnnnnnnnnnnnnnnnnnnnnnnnnnnnnnnnnnnnnnnnnnnnnnnnnnnnnnnnnnnnnnnnnnnnnnnnnnnnnnnnnnnnnnnnnnnnnnnnnnnnnnnnnnnnnnnnnnnnnnnnnnnnnnnnnnnnnnnnnnnnnnnnnnnnnnnnnnnnnnnnnnnnnnnnnnnnnnnnnnnnnnnnnnnnnnnnnnnnnnnnnnnnnnnnnnnnnnnnnnnnnnnnnnnnnnnnnnnnnnnnnnnnnnnnnnnnnnnnnnnnnnnnnnnnnnnnnnnnnnnnnnnnnnnnnnnnnnnnnnnnnnnnnnnnnnnnnnnnnnnnnnnnnnnnnnnnnnnnnnnnnnnnnnnnnnnnnnnnnnnnnnnnnnnnnnnnnnnnnnnnnnnnnnnnnnnnnnnnnnnnnnnnnnnnnnnnnnnnnnnnnnnnnnnnnnnnnnnnnnnnnnnnnnnnnnnnnnnnnnnnnnnnnnnnnnnnnnnnnnnnnnnnnnnnnnnnnnnnnnnnnnnnnnnnnnnnnnnnnnnnnnnnnnnnnnnnnnnnnnnnnnnnnnnnnnnnnnnnnnnnnnnnnnnnnnnnnnnnnnnnnnnnnnnnnnnnnnnnnnnnnnnnnnnnnnnnnnnnnnnnnnnnnnnnnnnnnnnnnnnnnnnnnnnnnnnnnnnnnnnnnnnnnnnnnnnnnnnctggcctctttaaattatcgatttaattatccaatactctcgaattaattcttagaatacgaaaaaaaaatcagtatcatattttatattttttacaagttatcaacttaaataagaggagaaacataattttaatttcttttttattttttaaataattgcaagtgccatatttaaataatcatgagaatactcacgttcaatgtaatattctcaaaaaaaaaatccatatgataacttaaacaatctataaagaaatataatttattcttgtgccaaatactaaaactataaacattttttattttagtttaccgtataaaattgcttaaatcaatgaaatttttattttaagaaaatattaatgattttttttaaaactttaagtagtttacatcaaaggtaattaaatttggcttaattagtcttcaaattttaactattattcaaatcaatccttttgttaaacctttacgtgttaagtaaacaacaaaaagtcttgccttataaaattcaaacattctattacatacggtttgaacccataattaattttaaacgatcaaattttaattattcaaaataaaagaaatgaaaacaaacttgtctcctggacaaaccgctggccactccaccaaatccatatcaaggtccccacttttccaacttgaaccatagactactccatcaagtctatgtcaaggtcctccattttttcatcttgaaccttaggacactccacaaagtccacccatagtaaggtctgtgacttcttcaacttctgcaacgcatatatggaaaataacttaattgtataagtgcttcttgcttctgcatataaatcataaaacttctattatttatactgctgcaagtgtctttcttttcttttttcttttttttatgatgtttcctttttttaattattgactttattatccaattctcccgagttaattcttagaataggaaataattttgaatttactttatctatctccctttttaaaattcctatatacacaaaattttgtattgaatttaactattatttaatcaatcctttcgttaaacttttgttaattaaacaataaaagtccaacattttattaaaaaaaattcaagtcttctatttcatggactccatcaagtcttttattaaaagtccaacttttgttaattcaagtcttttacaaaattttgttaattcaacttttgttaattattacaaaatttggtattgaatttaactattacttaattcaagccttttattaaaagttcaacttttgttaatttaaatattattttgttaattaaaccatagccgactccatcaagtccatctcaaggtcctgtattttttcatcttgaatttttggacactccacaaagtccagccatgttatggtctctggcttcaacttgaaccatagcccatagggcacaaacaatatattaatgataaatacatcaattataggaaaagggtctaatttaaagactatttcagttaaaaactctatataaaaaaagattatttcattcatatcttgctatttaattttgatcaattttttaattcaaaaaataatattctcttatatatgaaaaaagactagatttaatcgtcattaattggaatggttgttgtgtgatctatttctaattgtattcaaacatgaatattattttctttaacatataaaaattaattgatgatataaaaagaagtgtgaaaaagaatattaatttttttctaaaaaaaattagtagtatattttgtatttttttacacgtcatcaacttaaataataggagaaacataattttaatttccattttaatttttaaataattttaattgccagatttaagcaatcataaaatttctcatgttcaatataatattctcaaaaaaaaatattcatatgataaattaaataatctactaagaaatatgatttattcttatgtagatcgaatactaaaataagaaaaaaaaatattttagatcacaatataaaattgcttaaatcaatgaaatttcattttaagaaaatattaataatttttataatactttaaatcaaaggtaattaaatttggtttaattagtcttcaaattttaactattatttaaatcaatcctttcattacacaaagtacatgatagcttaacaagcaaggaggtgcaagcagtaacactctcacaaagataaagatctttaagccatattttttttccttttcttttctatgaactgtcatttcttatctctacatggaatgtctagaagttgaaaacttgagctttctttaactatactgctttccattttggcgaactgcttttctttctcataatgaactttccacttccaatgatggttcaacattaataattctttatctattttgtctaaaaattttcaatcactttttgtgagtggtgtgaatgtcatgcagacaaatgatgtccaagctccactttttccattcattgaaagttgtaagcagaatgtagaatgtacgtataataaaataatgagaatgccaactactagtacgtagtacttaattaaaacaaaagtatcaaaattagaaccaaaataactttgatgctgttaatacatgagtttaattttgatacacagtgtaaaaatttaaattgttaattaattagaaatcacctaatgatttgtaaaacaattactaaaaaaagtttcatttgaaacttagtcttccacccgtctcaagctctccacatgaacactaagctctagacaaaaataaataaataaataaataaccacgagaaataatatataactctttagtggacaattggtgttcttttgtgcattcagttgaaggaagttcccagaattgtagaaagcaagggacagatgaaacggccacagctaagaatagtgcatcttatatcgggaagagattgttagaaagtttggttgcagttgcagggcttctaatttggctttcatgagcttaactcaaatattgcctatatatatatattaccaatttggcttaactctaatttggctttcacaaaataatattctcttatatatgaaaacaaagactaaatttaattgtcatcaattgaaaaggttgtttgtgtcatctatttctaattgtattcaaacctaaatatgattttctttattatataaaaattaattattgatataaaaagaagtggtgaaaaagaatttaacttttttctataaaaaatagtatcatattttgtattttttataagttatcaacttaaataataggagaaacctaatttttattttcattttactttttaaataattgtaaatgtcaaatttaaaaaatcataaaaatactcacgttcaatataatattctaaaaaatatatttattcgtaaataatcttctacaaagaaatatattttattcttgtctcaaatactaaaataagaaacattttattttaatttacagtataggatttcttaaatcaatgaaatttttattttaagaaaatattaataatttttttaaaactttgagtagtttacagcaaaggtaattaaattcgacttaattagtcttaaaattttaactattatttaaatcaattaatcctttcgttaaacctgtacgtgttaagtaaataacaaaatgtcttgtcttataaaattcaaatattctattacttgcagtttgaacccataattaattttaaaatatctattttttattattccaaataaaagaaatgaaaacaaaattgtttagtctcctagacaaaccacttcccactccaccaaattcatatcaaggaccccactttttccacttgaaccatagactactccatcaagtccaagtcaatgtccttcattttttcatcttgaaccttaggacactccacaaagtccagccaaccatatttaggtctctatcttcttcaacatgaaccataggtcacacattaccttcatatcaagttccttatcattgacaacaaatgtttagaattaagtaagcaaggaaaaaaattataaatgatgaatacatcaattataggaaaatgatctaatttaaagactatttcggttaaaaaatctatataaaaaaagactctttcgtttcaatctaactatttaattttgatctattttttaatttacaaaataatattcttcttatatgtgaaaaaaaaactaattttcattgtcattaatcggaaagatggttgtgtcgtctatttctaattgtattttagcctgaatattatattctttttcattaataattaattagtaagatacaaagaagtgtaaaatgcttgtttaacttggtctaccataattattgagatcataacttttttcttttataagtcttggtccaaatttctccatatattgtagatcatatttagcttaaaaagtaaattagaggatatgatataccaagaagtgtggcatgtttttttaaattatttatctatggccttagctattttattgttagaccacaagtcttcatatattaaagtctttgtctgaatttcatttacttgtgtggtgatattttaagaatagtgatagaagagaaaaataaatatataatttattgaaatatctaacttatgaagatttgcattcttaatgcataagcttttcagtttatatattatcattatttggaaatatttgttgtgttaattgtctatttctaattaatttgaaaatgaatcttaattttttatcataaaaattagtatcatattttttattttctttacaagttatcaacttaaatactaataggagcaacataattttaatttccattttactttttaaataattttaagtgccaaatttaagcaatcataaaaatactcacgttcaataaaatatttttaaaaaataattcatgagatcacttaaataatctacaaagaaatataatttattcttgtgccaaataaacaacaaaaaaagtcttgcattattaaattcaagtcttctattacatgcaatttgaacctataactaattttaaatgatcaaatttttattattcaaaataaaagaaaagaaaaaaaattgtcttctagacaaaccacagacaactccaccaaatccatatcaaggtccccactttttcaacttgaaccataggccactccatcaaatctatgccaaagtttcttatcattgacaacaaatgttgagagttaagtcaagcatgaaaaaaaatagggtaaaatatataatttctatccgtataaaattttaatgtgctactttttttttttatcctgagttaagtttggatgatagataattatcatgtattcttagattttggtgtcattttaggatatttatgtgatatatgtcttttatgcttttttattgtcatgaactaatcttctcttttgttggagttgaatataattggttcatttttcatgtaatgactatttttttttattgaataaagcattctaattgtttctcttctatgtttaatatgtgtttttggcttaatcacctgtttgtatgattttttttattcaattgtaattaaaaaaattctttgaactacgaattgcaaaaaacacctaataatttttatgtctaggaataagataaaaagaattgagcatcaataaacactttatcttaatgaaaatcatttagttatattaatttaagagattgatagtgttatcaagggattttggtctcttcactaggaattaaagtgaagataatatgatgggtttatgataatataacctttattaaatatgaatgtgtagttattaggtgatagacacttcaatgaaattaaatcccaacaattttttcattgatttaaccccaacaattacatgaggtgtttgttaaaattcccaaacaatttttttccttaattttttcttttattttcttctttagttttcttatttttatttcttcctttaatttctttatctttatgcatattgttatttaaatcaaattagctaatgttaattaatttcaaatattcatagtatagaaattatactttttactacccaattattgcctaagtcctgttaatgagtattatagaaaaaaatgcatgaatagcgagagaaggaagatgtggaagggtttagaaactgcagaatcctatgcaagctccaactttctacactaattaaactcattcaggcaaattctaagttacattttgtgtaaaacaatcttcttaaatccaatcaccgagtgtgtcattccaggtattttaatgctaatcattgttagcgcacagatagtagaagacaatagtgcgtcataaatacaaaacagaatttgatactaagtctgaagctcgtctagttctcttaacattaagaacatttattaccaatgaaagcaaaacaaacagacaccccatatgaacatgtacatagtatggtaaaccttttcacatttttaatggctagactaacacgttgtaatgtctctcactcctaacagttaacatgtaaactcacaatttcccaagtaaccttcttaccttcaaaactattatcacataaatcagatctctcaagtggtcaagataatgaaaataagcacgcctccaagttctgttgaagaaaacaacactgcaaaacccccaaaatcctgctgcaaatccaactcccatacccatataaaactctgatgttccaaagaaattaccatcaccgtgtcaaacagaagcagtctctgtcaactcttccttgtctgtgcaattttttgttacaggaggaccacaaagctcaggatttccagtgtagctaagttcttcaaagctctgaagttgggtgctcgtgggaattctgcctgataagttgttgtatgatagattcaggacactgaggaaggacaaatcagataaactttgagggatttgacctgaaatgttgtttagtgagagatcaagggattctaacaatttcatttttcccatgtcatttggtatccctccagacagatgatttctagacaagttcaaaaaccgcaaagcagatagcttggaaatttcagatggaattgctccagacagcttattacttgaaagatcaatcattctcaccaatatcaaattgtctctgtactctaactcatctcctttgggaactaagacaagagtttccttttcacgccgcgtnnnnnnnnnnnnnnnnnnnnnnnnnnnnnnnnnnnnnnnnnnnnnnnnnnnnnnnnnnnnnnnnnnnnnnnnnnnnnnnnnnnnnnnnnnnnnnnnnnnnnnnnnnnnnnnnnnnnnnnnnnnnnnnnnnnnnnnnnnnnnnnnnnnnnnnnnnnnnnnnnnnnnnnnnnnnnnnnnnnnnnnnnnnnnnnnnnnnnnnnnnnnnnnnnnnnnnnnnnnnnnnnnnnnnnnnnnnnnnnnnnnnnnnnnnnnnnnnnnnnnnnnnnnnnnnnnnnnnnnnnnnnnnnnnnnnnnnnnnnnnnnnnnnnnnnnnnnnnnnnnnnnnnnnnnnnnnnnnnnnnnnnnnnnnnnnnnnnnnnnnnnnnnnnnnnnnnnnnnnnnnnnnnnnnnnnnnnnnnnnnnnnnnnnnnnnnnnnnnnnnnnnnnnnnnnnnnnnnnnnnnnnnnnnnnnnnnnnnnnnnnnnnnnnnnnnnnnnnnnnnnnnnnnnnnnnnnnnnnnnnnnnnnnnnnnnnnnnnnnnnnnnnnnnnnnnnnnnnnnnnnnnnnnnnnnnnnnnnnnnnnnnnnnnnnnnnnnnnnnnnnnnnnnnnnnnnnnnnnnnnnnnnnnnnnnnnnnnnnnnnnnnnnnnnnnnnnnnnnnnnnnnnnnnnnnnnnnnnnnnnnnnnnnnnnnnnnnnnnnnnnnnnnnnnnnnnnnnnnnnnnnnnnnnnnnnnnnnnnnnnnnnnnnnnnnnnnnnnnnnnnnnnnnnnnnnnnnnnnnnnnnnnnnnnnnnnnnnnnnnnnnnnnnnnnnnnnnnnnnnnnnnnnnnnnnnnnnnnnnnnnnnnnnnnnnnnnnnnnnnnnnnngattgtctctgtactctaactcatctcctttgggaactaagacaagagtttccttgtagtggttataactgaagtcagagccatatgaataacttaaagggttggcaaagaagtcatcttcaccagccattgtcttcatgtcatccaaacaatttggaatggatcctgacaggctgttattgccaagatccagcactataagggaagaaagttgacaaatcttttgagtaatgctgccattgaaattgttggatcttagacgaagaaccattagatattgcatttcccacatccaatctggtattgcgtcagaaagttggttattgcccatgtcaatgaatttcattgtagagcaattttgcagtgttgaaggaatatatccagagaagcggttgtcgtctaacaacaaagactcaagttgagatagataccccatggagtttggaatagcaccagacaaattgttactacccaagttcaaatgcaccaaagcttgccaatgcacccaacagtgaccaagatcaccagataagacattatttgaaaaatcaagcacacttaaattattagtagcattttcctttccacataaaaagggagaaattgttccggaaattgagttattggcaacattcagcacttcaacatttgcagacacacttggcaatgtacccttgaacaaattagaactcaaatttatgaggctggaattgagaaagatgttagataggtctccacttaacagattgttggacagatccaggaattcagtttgcaaagtccaattccaaaaccaacttggaaccaagtctgcaatacctgccttagacattgtcaaaaccttcacagaactttgcctttttagccattctggaaacttaggacctattccaaaggagctcagtaaaacatattcaagctgaaaaggaggaacccatcctgagttgacactgaggaacaagtttgtccaagacaaacgtagttcctttaatttcaaaagttttacaaaatttgactcttttatagatccttctaacaaattagatgaaaggtctaacattactaaatttgagagagttccaagagttacaggcatatcaccagtcaaagaattagttccaagatttaatacctgcaggtttctgaggaactcaaaactcttaggaatggttccattcagtcggttgtgagccaggtttaaagttctcaaggatgacaagtttgcaaatggtgagggaattggacaagtaaaggtattattactgagatttagaacttcaagatgcttaagctggcctaatgaatctggaagtggcccactgagctggttgttctgcaggtctagattttttatgttctgaaggcttgatattatttgtggaatttctccctgtaaaaggttactgtgtaaatcaagttggacaagagctgtgctgagattaaatagccatgaagggatttgctgattgagattgttaattgaaagatcaaggacttggagatgtgtgaagttggcttttcgttttggtggtcctaagttatcaatttgacagctctccaagtgtagttctgaaagagatggaagtgcactcagtacttgaagccagttaccttttttatgaaggtctgaaccactcaaatcaaggtactcgaaggaagatagccttgatatccaattaaggttatctatctgaagagcataattgtatccaagattaaggtgctgcaggtttgagaggtttcctagttgatgagggattaatcccatgaacccacttaagctaaggtccaagtatctcagactctccaatgagcctaggaagcttggtattggagtaagaacaaaataatttgaactcaagtccaaacgattcaaatattttagttcaagcaaagaaggactaatctctccactcaactccctatagggagagcccgcaggtgtgtcaagattgatttccatgactttacctgtgttgttgcagtgaacccctggccatgtacagcaatccgatttgtcagaccacgatgaaagcctgtttgaagggtctgctagtccatgcttgaagctgaggagtgcattcctttccttctcgctgcaagtcatattgagccttgctgccttgcttgcactgaagtggagagttgttgcagtggacaatatcaagagaagaacatgagttgcaaatagcactgccatgaagaagaaggaagaaggaagacgaaaaaggttgaatccacaattttctggttcacggttggtatttactactaacaatgcctatataggatatataccattctagaaagcacgatgatatcttccttcacgattataccagctgcatgggtctcatgctttttgcttcctgcaacccctttactccctgcagtcccgtattactatccctatcaccacaccaccattattttgctctagtttattttattttgatttaattacccttttagttcttataattgtgataattttttttagtctctatagtttaagacattcattttgattcttatatttacaattttttttatcttttggtcctcgcggtgaagattcaactcacacataaacatgaacaaaattaataaaaatagggaagcaagctcaggtacaaatgaagtgtaatggaggtatgagacaaagccactacacattccattattcttgagtttgccaattgccatgatgtaatctccatcttgacagtctctcatcaagttggagtggtatcacagcattgaactaagttgatcgttccaatgggatgatggttttgattgctgcagataaagtgtgtgattgtgagtttctggtcccatgagttaaactataaggattaaaaaaaatattgtcataactttaagggccaaaaggataattaaaccttttattttttttaacaacgggttatatatatgtagcagtttattctaaacaatggaatacgtgtgaaatctttgaattctatgtaagaaatgttatttcaaacttctcatcagtcttcatgccaatgatgacatgctccatttgaattctatgtctaattaagctctcggtcttccgtttttgcaactttatttcgtagaaagcagccaaatttgaagatacaacatttgatactataactgtttggtgttttgaaaatctcactcacatatttccaaatgttacaaaagaatttgattaagtggtttttacgaattccttcctagccttttttaccaagtcagggaatttgcattgttgtgcatgatggctgccacaaggaccattgtaccaacccattagtgcaagtggttttttcttatgagaattgagaaacaaattatatatgtgttttataaagggaattctattatttttaattttgaacttgtaatgtttttggtttccctcacagaacaagtgatgaaactcttgatgatcgacgccatacgtacgcctactttgatgctcttttttcacaccacttttatcttaatggtatctcaagttgacaatcataaattaaaatagctaactatagttgattagtagagacaaacagctcaaagataaagatctttaagccatcatttttttttccttttcttttctatgagctgtcatttcttatctctacatggaatgtctagaagttgaaaattacttgagctttctttacctactgctttccattttggcgaactgcttttctttcccataaccaggaattcatgggaagtgacgttgtggcagaggactccataccagtggcaacagttggtattattatgattccaagaccaaagcctattggaaggatctatgagattattcttaaacttcaaaagtgtctcacgctcacttgggatgcacacactctctctgcatggtaagctcaacaaccaaagctggacaaagacaagaatataaatggaggaagaattcatgatcatgcaagaatatatagaaaacaagtgtagttgttggttctgcatataaatcatcaaacttctattatttatactgctgccctgcctgtttcctgtcattgataacaaatgttgcgagttaagtcaagcaaggaaaaaaaaatattattgatgaataaatcaattataggaaaagagtttactttaaagactattttggttaaaaaaatatataaaaaaaattatttcattccaagctagctatttaattttgatcaatttttcaattcacaaaataatattcttcttatatgtgaaaaagactaattaatcttcattgtcattaatgattgttgtgttgtttatttctaattgtttttttaatcataatattattttctttttattaaaaattaattagtgagatacaaaaaagtttaacgtgatctatcataattattgagatcatagtttttccttttataagtcttggtccaaatttctccatgtattgtagattatatttaacttaaaaagtaaattagaagatctacaaagaagtgtgacatattttttaaattataaaattatggtcctagctatttattgttagaccacaagttttcatatattaaagtttttgtctaaatttcatttatgttgatagtttaagaatagtgatagaagagaaaaataaatattcaatttattgaaatatctaactcaattaattgatgaatacatcaattataggaaaagggtgtactttaaagactatttctattaaaaaatctataaaaaaattatttccttccaatctaattatttaattttaatcaatttttcagttcacaaaataatattctcttatataggaaaaaaagactagatttaattatcatcaattggaaaagttattgtgtcatgtatttataattgtattcttacttgtatattattttatttatcatannnnnnnnnnnnnnnnnnnnnnnnnnnnnnnnnnnnnnnnnnnnnnnnnnnnnnnnnnnnnnnnnnnnnnnnnnnnnnnnnnnnnnnnnnnnnnnnnnnnnnnnnnnnnnnnnnnnnnnnnnnnnnnaatttccattttactttttaaataattgcaagtgacaaatttaaataatcatgagaatactcacattcaatataatattttcaaaaaaaaaatccatacgataacttaaacaatctataaagaaatataatttattcttgtgccaaatactaaaacaagaaacattttttattttagtttaccgtatagaattgcttaaatgaatgaaatttttattttaataaaatattaatgatttttttaaaactttaaatagtttacatcaaagataattaaatttggcttaattagtcttcaaattttaactattattcaaatcaatcctttcgttaaacctgtacgtgttaagtaaacaacaaaaaatcttgtcttataaaattcaaacattttattacatgcggtttgaacccataattaattttaaactatcaaattttaattattcaaaataaaagaaatgaaaacaaaattgtctcctagagaaaccgctggccactccaccaaattcatatcaaggtccccacttttccaacttgaaccatagactactccatcaagtctatgtcaaggtcctccattttaaggtccccacttttccaacttgaaccataaactacttcaaccttaggacactccacaaagtccacccatattaaggtctctgacttcttcaacttctgcaacgcatatatagaaaacaacttaattgtataagtgcttcttgcttctgcatataaatcataaaacttctattatttatactgctgcaagtgtctttcttttcttttttctttttttatgacgtttcctttctttaattattgactttattatccaattctcccgagttaattcttagaataggaaataattttgaatttactttatctatctcccttttaaaaattcctatatacacaaaattttatattgaatttaactattatttaatctatcctttcgttaaacttttgttaattaaacaataaaagtccaacattttattaaaaaaattcaagtcttctatttcatggactccatcaagtcttttattaaaagtccaacttttgttaattcaagtcttttacagaattttgttaattcaacttttgttaattattacaaaatttggtattgaatttaactattatttaattcaagccttttattaaaagttcaacttttgttaatttaaatattattttgttaattaaaccatagccgactccatcatgtctatctcaaggtcctgtattttttcatcttaaacctttggacactccacaaagtccagccatgttatggtctctggcttcaacttgaaccatagcccatagggcacaaacaatatattaatgataaatacatcaattataggaaaagggtctaatttaaagactatttcagttaaaaaatctatataaaaaaagattatttcattcatatcttgctatttaattttgatcaattttttaattcacaaaataatattctcttatatatgaaaaaaagactagatttaatcgtcatttaaaatggttgttgtgtgatctatttctaattgtattcaaacatgaatattattttctttatcatataaaaattaattagtgatataaaaagaagtgtgaaaaagaatattaatttttttctaaaaaaaattagtagcatattttgtatttttttacacgtcatcaacttaaataatagaagaaacataattttaatttccattttaatttttaaataattttaattaccaaatttaagcaatcataaaatttctcatgttcaatataatattctcaaaaaaaaatattcatatgataacttaaataatatactaagaaatatgatttattcttatgcagatccaatactaaaataagaaaaaaaaatatttttgatcacaatataaaattgcttaaatcaatgaaatttcattttaagaaaatattaatcatttttttaatactttaaatcaaaggtaattaaatttggtttaattagtcttcaaattttaactattatttaaatcaatcctttcttacacctttgttaagtaaatgatagcatagcaagcaaggaggtgcaagcagtaacactctcacaaagataaagatctttaagccatcatttttttttccttttcttttctatgaactgtcatttcttatctctacatggaatgtctagaagttgaaaacttgagctttctttaactatactgctttccattttggcgaactgcttttctttctcataatgaactttccactattccaatgatggttcaacattaataattctttatctattttgtctaaaaatttccaatcactttttgtgagtggtgtgaatgtcatgcagacaaatgatgttcaagctccactttttccattcattgcaagttgtaagcagaatgtagaatgtacgtataataaaataatgagaatgccaactactagtacgtagtacttaattaaaacaaaagtatcaaaattagaacgaaaataaatttgatgctgttaatacatgagtttaattttgatacacagtgtaaaaatttaaattgttaattaattagaaatcacctaatgatttttaaaacaattactaaaaaaagtttcatttgaaacttagtcttccacccgtctcaagctctccacatgaacactaagctcttgacaaaaataaataaataaataaataaccacgagaaataatatataactctttagtggacaattggtgttcttttgtgcattcagttgaaggaagttcccagaatggtagaaagcaagggacagatgaaacggccacagctaagaatagtgcatcttatatcgggaagagattgttagaaagtttggttgcagttgcagggcttctaatttggctttcatgagcattactcaaatactacctatatattaccactttcatatcacaaaatgtgttgccttataaaattcaaatattctattattacttgcagtttgaacccataattaattttaaaatatcaattttttattattccaaataaaagaaatgaaaacaaaattgtctagtctcctagacaaaccacttcccactccaccaaattcatatcaaggaccccacttttcccacttgaaccatagactactccatcaagtccaagtcaatgtccttcattttttcatcttgaaccttaggacactccacagccaaccatatttaggtctctatcttcttcaacatgaaccataggtcactacattaccttcatatcaagttccttatcattgacaacaaatatttagaattaagtaagcaaggaaaaaaattataaatgatgaatacatcaattataggaaaatgatctaatttaaagactatttcggttaaaaaatctatataaaaaaagaccctttcgtttcaatctaactatttaattttgatctattttttaatttacaaaataatattattcttatatgtgaaaaaaaactaattttcattgtcattaatcggaaagattgttgtgtcgtctattctaattgtatcttagcctgaatattatattctttttcattaaaaattaattagtaagatacaaagaagtgtaaaatgcttgtttaacttggtctaccataattattgagatcataacttttttcttttataagtcttggtccaaatttctccatatattgtagatcatatttagcttaaaaagtaaattagaggatatgatataccaagaagtgtgacatgtttttttaaattatttatctatggccttagctattttattgttagaccacaagtcttcatatattaaagtctttgtctgaatttcatttacttgtgtggtgatattttaagaatagtgatagaagagaaaaataaatatataatttattgaaatatctaacttatgaagatttgcattcttaatgcataagcttttcagtttatatattatcattatttggaaatattaatttgttgtgttaattgtctatttctaattaatttgaaaatgaatcttaattttttatcataaaaattagtatcatattttttattttctttacaagttatcaacttaaatactaataggagcaacataattttaatttccattttattttttaaataattttaagtgtcaaatttaagcaatcataaaaatactcacgttcaatataatctttttaaaaaataattcatgagatcacttaaataatctacaaaaaaatataatttattcttgtgccaaataaacaacaaaagaagtcttgcattattaaattcaagtcttctattacatgaaatttgaacctataactaattttaaatgatcaaatttttagtattcaaaataaaagaaaagaaaaaaaaattnnnnnnnnnnnnnnnnnnnnnnnnnnnnnnnnnnnnnnnnnnnnnnnnnnnnnnnnnnnnnnnnnnnnnnnnnnnnnnnnnnnnnnnnnnnnnnnnnnnnnnnnnnnnnttctattacatgaaatttgaacctataactaattttaaatgatcaaatttttagtattcaaaataaaagaaaagaaaaaaaaattgtcttctagacaaaccacagacaactccaccaaatccatatcaaggtccccactttttcaacttgaatcataggccactccatcaaatctatgccaaagtttcttatcattgataacaaatgttgagagttaagtcaagcatgaaaaaaaatagggtaaaatatatcatttctatccctataaaattttaatgtgctacttttttttttatcctgagttaagtttggatgatagataattatcatgtattcttagattttggtgtcattttaggatatttatgtgatatatgtcttttatgcttttttattgttatgaactaatcttctcttttgttggagttgaatataattggttcatttttcatgtaatgactatttttttattgaataaagcattctaattgtttctcttctatgtttaatatgtgtttttggcttaatcacctgtttgtatgattttttttattcaattgtaattaaaaaattctttgaactacgaattgcaaaaaacacctaataatttttatgtctaggaataagataaaaagaattgagcatcaataaacactttatcttaatgaaaatcatttagttatattaatttaagggattgatagtgtaatcaagggatttaggtctcttcactaggaattaaagtgaagataatatgatgggtttatgataatataacctttattaaatatgaatgtgtagttattaggtgatagaaacttcaatgaaattaaaccccaacaattttttcattgatttaaccccaacaattacatggggtgtttgttaaaattcccaaacaatttttttccttaatttttttcttttattttcttctttagttttcttatttttatttcttcctttaatttctttatctttatgcatattgttatttaaatcaaattagctaatgttaattaatttcaaatattcatagtatagaaattatagtttttattacccaattattgcctaagtcctgttaatgagtattatagaaaaaatgcatgaatagcgagagaaggaagatgtggaagggtttagaaactgcagaatcctatgcaagctccaactttctacactaattaaattcattcaggcaaattctaagttacacgttgcgtaaaacaatcttcttaaatccaatcaccgagtgtgtcattccaggtattttaatgctaatcattgttagtgcacagatagtagaagacaataatgcgtcataaatacaaaacagaatttgatgctcaagtctgaagctcgtctagttctcttaacattaagaacatttatgatacgggtgcaggaaacatagagagtgataaagaaggtgctgaggaagaagagcagaagaggagggaagaagaaagggaggtgcaagaagaaggaaggcccaaaaggaagatcctgaagcccaagtacttaaaggattacgtttaaagaaggagacacagcagtatacttagccttaagcttaaataggaacattaagaatatatatatatatactcttccagaagatattcataaccaattctgttacaggcatattctagaatgattccatagctagacaactcagcacaattctgttatcgaaccatctatataatagcatgtaaataacaagcttaaggcaatgaaatatacaatttacctaaatttccccttcttctaaagcttcttctcccttcttctctgtggagggtctggacctcgaaatccagaagctatcactggtgctttcattgtccttctgcttccatggctgattccggcactgatcgagtcgaggccgccttagaccgcctcacttcgcgcattgaagacctccttcagcacgtgaccccttcaccatcaccaccctttccctcttgcaaccccgttcctgcacagacacacagaatgaagttagatgtccccagattcgatgggactgatcctatgggctggatttttaaaattacacagttcttcgagtaccacggtactcctaatcaggaccgcatcaccattgctgctttttatatggagggaagggcccttgcttggttccagtggatgtcaagcaacggccaattcacctcttggtccgtattcctacaggccttgcagacccggtttgccccatccaactacgaggatccctcgggatctctgttcaaacttactcagcgaaccacagtgacagaatacttatctgaatttgaggagcttgccaacagggtcgtcggactcccaactccatttcttctcagctgctttgtttccggacttgcgccggacattcgccgcgaagtcatgatcaaccagccgctcacggtggctcaagccgcaggtctcgcgcgcctccacgaagagaaattgcgtgacctccgcttcgattttcgccatcctacccgccctcgaaccccccaaccaccacctatagtctcacagcaccctccgacactaccctcgtttccctctccacgcgccccctcactttcccctttacttccattacccccacgtactaacccaccaccgccacctacattccgtcgcctgaccccggaagagctagcctcgcgtcgggagcggggcctctgcttctcttgtgacgaaaagttccacaaaggccataggtgcgcccctagggttcaccttctgatagcagacgaggaggaccccgtggagcacatgggttctaatatagacccatcagtccctattgacccgggacccggcccaatggaaatacccgactccccagcccatattagcctcaactccttagcgggccatttagcccccgagaccctccgactcgtcggcgacatctccggcatccctgtcctggtcctcatagacggtgggagcacccacaatttcctccaggagcagcttgtggttcaattgggccttacctctcatcccacctcaccattaaaggtcatggtcggaaatggacagtaccttcagtgtcacacgatttgtgactccgtcactctcatccttcaacagcactcgttcacagtggatttctatgtgcttccaattgccggcgctaatgtcattcttggtgtccaatggttgcaatcattggggcctgttttaactgattacactcaccttagtatgcaattttttcatgatggcaggttagtcaatttacaaggggacccagaggctcatcgtggcctgttatcttctccacagttccggcgagcttgccgcactcaaaaccagagtctctacttccacatcaccatgcttccaaacgacttagactccccgttgaccagaaccgttgaccctcaggtacaacacctccttcaacagttctccatcctctttcaggagcccaacgcccttccgccggccagggacacggatcatcaaatccacctaagaccccatgccactccagtcaatgtccggccatataaatacccctattaccagaagcgtgagatcgaaactcaggtggaaacaatgcttcaacgaggaatcattcaacccagcaagagtccattctcctcgccggttttattggtcaagaagtccgacaacacatggaggttctgcgttgactatcgtgcgctgaatgccctcacaatcaaagatcgttttccaatcccaacgatcgatgagcttttagacgagctaggcggtgctagttgcttctccaagctggatttgttgcaggggtatcatcagatacgcatgcaaccggatgacatccccaaaacggccttccgcacgcatcacgggcactttgaattcaaggtgatgccctttggcttgtgtaacgcgccttcatctttccaggcgactatgaacacgcttttccgaccgtatctccggcgttttatcatcgttttcttcgatgacattctcatatacagcgtctctctcagtgatcacctgcgtcacttacaaaccacctttcaggtgctttatgagaatcattttgtgcttaagctctccaaatgtctctttgctcaacccgaagtcgagtatttaggccacctggtttcatacaagggcgttcaacctgtcattgcgaaactcgatgccattgctcagtggcctcaacctcgatctgttcgcgctctccgaagtttcctgggccttgccggcttctaccgcagattcatccgcggttacgccaccatcgcggcaccactcgtgaaggccactactgttgaaccccttcaatggacttcctcaacccagactgcttttgaaaccctcaaacaagctctcacctcagccccggttctcactcttcccaacttccaatttccttttaccattgagactgatgcatccgcaattgggatgggggctgtcctatcacaacagggccacccaattgcttatttcagtaaaccctttagccagaagatgctccgcgcctccacttatgtccgcgaactgtttgccattaccgccgccgtgaagaagtggcggcaataccttctcggacatccttttaccatcttgaccgaccaccgtagcttgaaagaattaatgactcaggtggttcaaacacccgaacaacacacctatcttgctcgattgctgggttatgactaccagattcagtatcgttccggtagccataatcaggccgcagacgcgctttcacgcttgccggaaaatgcttttcaagccctactcatcctctttgtcccatgtctcacttttttggaagaacttcatgcccaacttggtgccaatcattcctttcagaacatgttgcaggaggttcagcaccaccccgacactcaccctgatttctctatagccaacaagctattattgtataagggtcgcatatggttgccgtcggacttacccataatccaaaccttgttgacggagtatcacgccactcctacggggggacacgccggtgtagccaagacggtagctcgtctcacaaccaatttcttttggaatggccttaaggatgatgtcacgcgtttcgttgctaactgcgtcgactgccaaatcaccaagtatgagactaagaagacagctggccttctctgcccccttcctgttcctagtcaaccttggtctgacttgtccttggactttatctgcggtcttccaccataccgcggcaacacaacgattcttgtcgtagtggatcgtttctccaaaggcattcacctgggcatgttaccccagagtcactcagctctcgccgtggcgcgcctcttcttggacttggtggttaaaatccacggccttccccggagcatcgtctccgaccgagaccctctttttgttagtcatctgtggcaggaactattcaaattaagcggcacccaactccgactgagctcggcctatcatccccaaagcgatggacagactgaggtcttaaacagagtggtggaacaatacttgcgtgcttttgtccatcggaaaccggcaagttggggcagattgcttccatgggtcgagtggtctcacaatacctcatggatggcgaacaccggcaccaccccttacgagatcaccttcggccggaagccttttaatttcccagattatattgcgggaacttccagggtcgaggccgtggaggagattttaactgatagagacgccaccttccaattgatccgcaagaagcttttaaaagctcagagcaagatgaaacactatgttgatcaacaccgcagagatgtccaatttgccgtcggagattgggtcttggtccgccttcgcccatatcgccaatattccgcgaaggagccgcaccgtaccggagagaaactagctcgccgctactatggtccttttaaagttgccgccaagctcggacctgtcgcgtatcgtttggaactcccagaaggggtacgtttacaccccgtgtttcattgctcaaagctgaaaccatttcgcggggacccggaactatcgtcaccaccttccctcccacccactttccatggaacccaacctctcatttctcctttagctatcctggcgtatcgtcgcgcgaccactgatccccacagcccatggcaggtcttggtacagtggcagggcctgtcaccagaggagacatcatgggaagactggcagcagctttgccaggactatcaccttgaggacaaggtgatcctgcaagggccgagggatgatacgggtgcaggaaacatagagagtgataaagaaggtgctgaggaagaagagcagaagaggagggaagaagaaagggaggtgcaagaagaaggaaggcccaaaaggaagatcctgaagcccaagtacttaaaggattacgtttaaagaaggagacacagcagtatacttagccttaagcttaaataggaacattaagaatatatatatatatactcttccagaagatattcataaccaattctgttacaggcatattctagaatgattccatagctagacaactcagcacaattctgttatcgaaccatctatataatagcatgtaaataacaagcttaaggcaatgaaatatacaatttacctaaatttccccttcttctaaagcttcttctcccttcttctctgtggagggtctggacctcgaaatccagaagctatcaatttattaccaatgaaagcaaaacaaacagacaccccatatgaacatgtacatagtatggtaaaccttttcacatttttaatgtctagaataacacgttgtaatgtctctcactcctaacagttaacatgtaaactcacaatttcccaagtaaccttcttaccttcaaaactattatcacataaatcagatctctcaagtggtcaaggtaatgaaaataagcacgcctccaagttctgttaaagaaaacaacactgcaaaaaccccaaaatcctgctgcaaattcaactcccataccgatataaaactctgatgttccaaagaaattaccatcaccgtgtccaacagaagcactctctgtcaactcttccttgtctgtgcaattttttgttacaggaggaccacaaagctcaggatttccagtgtagctaagttcttcaaagctctgaagttgggtgctcgtgggaattctgcctgataagttgttgtatgatagattcaggacactgaggaaggacaaatcagataagctttgagggatttgacctgaaatgttgtttagtgagagatcaagggattctaacaatttcatttttcccatgtcatttggtatccctccagacagatgatttctagacaagttcaaaaaccgcaaagcagatagcttggaaatttcagatggaattgctccagacagcttattacttgaaagatcaatcattctcaccaatatcagattgtctctgtactctaactcatctcctttgggaactaagacaagagtttccttgtagtggttataactgaagtcagagccatatgaataacttaaagggttggcaaagaagtcatcttcaccagccattgtcttcatgtcatccaaacaatttggaatggatcctgacaggctgttattgccaagatccagcactataagggaagaaagttgacaaatcttttcagtaatgctgccattgaaattgttggatcttagacgaagaaccattagatattgcatttcccacatccaatctggtattgcgtcagaaagttggttattgcccatgtcaatgaatttcattgtagagcaattttgcagtgttgaaggaatatatccagagaagcggttgtcgtctaacaacaaagactcaagttgagatagataccccatggagtttggaataacaccagacaaattgttactacccaagttcaaatgcaccaatgcttgccaatgcacccaacagtgaccaagatcaccatataagacattatttgaaaaatcaagcacacttaacttattagtagcattttcctttccacataaaaagggagaaattgttccggaaattgagttattggcaacattcagcacttcaacatttgcagacacacttggcaatgtacccttgaacaaattagaactcaaatttatgacgctgcaattgagaaagatgttagataggtctccacttaacagattgtttgacagatccaggaattcaatttgcgaagtccaattccaaaaccaacttggaaccaagtctgcgatacctgccttagacattgtcaaaaccttcacagaactttgcctttttagtcattctggaaacttaggacctattccaaaggagctcagtaaaacatattcaagctgaaaaggaggaacccatccagagttgacactgaggaacaagtttgtccaagacaaacgtagttcctttaatttcaaaagttttacaaaatttgactcttttatagatccttctaacaaattagatgaaaggtctaacatcactaaatttgagagagttccaagagttacaggcatatcaccagtcaaagaattagttccaagatttaatacctgcaggtttctgaggaactcaaaactcttaggaatggttccattcagtcggttgtgagccaggtttaaagttctcaaggatgacaagtttgcaaatggtgagggaattggacaagtaaaggtattattactgagatttagaacttcaagatgcttaagctggcctaatgaatctggaagtggcccactgagctggttgttctgcaggtctagattttttatgttctgaaggcttgatattatttgtggaatttgtccctgtaaaaggttactgtgtaaatcaagttggacaagagttgtgctgaggttaaatagccatgaagggatttgctgattgagattgttaattgaaagatcaaggacttggagatgtgtgaagttggcttttcgttttggtggtcctaagttatcaatttgacagctctccaagtgtagttctgaaagagatggaagtgcactcagtacttgaagccagttaccttgtttatgaaggtctgaaccactcaaatcaaggtactccaaggaagatagccttgatatccaattaaggttatctatctgaagagcataattgtatccaagattaaggtgctgcaggtttgagaggtttcctagttgatgagggattaatcccatgaacccacttaagctaaggtccaagtatctcagactctccaatgagcctaggaagcttggtattggagtaagaacaaaataatttgaactcaagtccaaacgattcaaatattttagttcaagcaaagaaggactaatctctccactcaactccctatagggagagcccgcaggtgtgtcaagattgatttccatgactttacctgtgttgttgcagtgaacccctggccatgtacagcaatccgatttgtcagaccacgatgaaagcctgtttgaagggtctgctagtccatgcttgaagctgaggagtgcattcctttccttctcgctgcaagtcatattgagccttgctgccttgcttgcactgaagtggagagttgttgcagtggacaatatcaagagaagaacatgagttgcatatagcactgccatgaagaagaaggaaaacgaaaaaggttgaatccacaattttctggttcacggttggtatttactactaacaatgcctatataggatacatatcttctagaaagcacgatgatatcttccttcacgattataccagctgcatgggtctcatgctttttcttcctgcaacccctttactccctgcagtcccgtattactatccctatcaccacaccaccattattttgctctagtttattttattttgatttaattacccttttagtccttataattgtgataattttttttagtctctatagtttaagacattcattttgattcttatatttacaattttttttatcttttggtcctcgcggtgaagattcaactcacacataaacatgaacaaaattaataaaaatagggaagcaagctcaggtacaaatgaagtgtaatggaggtatgagacaaagccactacacattccattattcttgagtctgccaccgacctctgcaagcttagcatttgccaattgccatgatgtaatctcgttcttgacagtctctcatcaagttggagtggtatcacagcattgaactaagttgatcgttccaatgggatgatggttttgattgctgcagataaagtgtgtgattgtgagtttctggtcccatgagttaaactataaggattaaaaaaaatattgtcataactttaagggccaaaaggataattaaaccttttattttttttaacaacgggttatatatatgtagcagtttattctaaacaatggactacgtgtgaaatctttgaattctatgtaagaaatgttatttcaaacttctcatcagtcttcatgtcaatgatgacatgctccatttgaattctatgtctaattaagctctcggtcttcgtttttgcaactttatttcgtagaaagaagccaaatttgaagatacaacatttgatactataactgtttggtgttttgaaaatctcactcacatatttccaaatgttacaaaagaatttgattcagtggttattacgaattccttcctagccttttttaccaagtcagggaatttgcattgttgtgcatgatggctgccacaaggacccttgtaccaacccattagtgcaagtggttttttcttatgagaattgagaaacaaattatatgtgttttattaagggaattctattatttttaattttgaacttgtaatgttttttgtttccctcacagaacaagtgatgaaactcttgatgatcgacgccatacgtacgcctactttgatgctcttttttcacaccacttttatcttaatggtatctcaagttgacaatcataaattaaaatagctaactatagttgattagtagagacaaacagctcaaagataaagatctttaagccatcatttttttttccttttcttttctatgagctgtcatttcttatctctacatggaatgtctagaagttgaaaattacttgagctttctttacctactgctttccattttggcgaactgcttttctttctcataatgaactttccacttccaatgatggttgaacattaataattcttcatctattttgtctaaaaatttccactcactttttttagtggtgttaatgtcatgcagacaaatgatgtccaagctccactttttccattcattgcaagttgcaagcagaatgtagaatgtacgtataataaaataatgagaatggcaactgctataagtactacttaattagaacaaaagtatcaaaattaaaacgaaaataactttgatgctgttaatatatgagtttaattttgatagatagtgtaaaaatttaaattgtttattaattagaaatcaccaaatgatttgtaaaacaattagtaaaaaagttataagaaatatatatataattaattaattgcaaatgaaagtgtatttaaattaaattcttaattaacatatccttattgtgatattttgtatattttttatttaattgagacagtggaatgagaccgcactataattttcatcacgggttgtattgtctaatataatagggatggttggtgaggaattttggaatgttagttggttttagactatatatcctcttgttcagttttcacattctcattagagttaagttgcttttggggaagaaccaatgtcttgaaattccctcttcaccagaagcagttttattgtgtctttatcgaagtcatcttctccagagacttgcctttaactttgaagataggaaatagatcagtcaaacattgtttcagtttatttggattttattttaaggacatgtgatttacaaagacttcttacaactcacaacctttggaatttctctatgcctggttaacccacaatttctggcgcctgttgcggttaggaacataggctagcaaaaacactaatcatttcaagagaaatgttaacacacttttctaatatattattttttatattaaaatttattaaaataaaaaattcagctgatctcatattttatttagcaaatttttcccatatattaagtcttaggtttttaaaattataaagctaaaactaaaatgttttactaaatgtattttaaagtaaattttacacacaaaaatattatgattttataaaaattgtttggtcaagggagacatattgagccctcctaactataagctaccctgagggtttctatctttttttttcccacttaatttttgactttggcagcaagggttaaacctaccacatctacatgactatgtcttactttccaataagttacacctaaatagctaacatattcctcttgctcacgcacactatctttcgtaaacttttcacgatcatctttatattatcaaattcatttaattaatatacaattatcttaatattataagcaagtctctgtataatcatgtagtgtttctaaattgaatgagcctaaatcacacacctgaaaaaaaaagagtcatattgtcaaaatagccgtaaaaagatagaaatactaagttatgggcaagattttgatatactataaccttaatttttacaataaacctaaatgtctaaatatcataactcaaccatgcgacgaaatgacaatgtgttaattttgttgtgtcctcaaccatgcgtatgcctcaggccgagggaattctcacacaccactcctaacaatttctaaggaattccacaacgtgtctatgcttcagacaacaataacgtaccaaataaacaagtagcatctaataatgttaaaataagcacacatatatcgagccaaccaacgttggaggtagaagaacaacaataatatcaatatttaattttatttagtgttaatttattaggaactcaacgtaaaataacaatttattaggaaataaatacaaaatttgagtatttattaagaataaaaacatatttaatttcatttagtgtttaatagtgttttggtctattttttgtttttttgtttttttatagttatttcttttcaaatttgatgacaacattgtcattgggtccttctacccttcacatcagcaaattggacactaaagagactcggtcagaaacaaataactactaggggtacaataacatgagaggatttaacacttttggagtaggaaaatgtactttaagaaaagaaaattatatgtttatccatgaacactaagctctagagaaaaaaaaaaccacgagaaatagtatataactctttagtggacaattggtgttgtacaaaattgaaatgatccagactaagtcaacaaactggtcttcttcattgactcacagtgaaccacagatttattttcatctgctagttccttcccaattcccatgttttctaaaaggnnnnnnnnnnnnnnnnnnnnnnnnnnnnnnnnnnnnnnnnnnnnnnnnnnnnnnnnnnnnnnnnnnnnnnnnnnnnnnnnnnnnnnnnnnnnnnnnnnnnnnnnnnnnnnnnnnnnnnnnnnnnnnnnnnnnnnnnnnnnnnnnnnnnnnnnnnnnnnnnnnnnnnnnnnnnnnnnnnnnnnnnnnnnnnnnnnnnnnnnnnnnnnnnnnnnnnnnnnnnnnnnnnnnnnnnnnnnnnnnnnnnnnnnnnnnnnnnnnnnnnnnnnnnnnnnnnnnnnnnnnnnnnnnnnnnnnnnnnnnnnnnnnnnnnnnnnnnnnnnnnnnnnnnnnnnnnnnnnnnnnnnnnnnnnnnnnnnnnnnnnnnnnnnnnnnnnnnnnnnnnnnnnnnnnnnnnnnnnnnnnnnnnnnnnnnnnnnnnnnnnnnnnnnnnnnnnnnnnnnnnnnnnnnnnnnnnnnnnnnnnnnnnnnnnnnnnnnnnnnnnnnnnnnnnnnnnnnnnnnnnnnnnnnnnnnnnnnnnnnnnnnnnnnnnnnnnnnnnnnnnnnnnnnnnnnnnnnnnnnnnnnnnnnnnnnnnnnnnnnnnnnnnnnnnnnnnnnnnnnnnnnnnnnnnnnnnnnnnnnnnnnnnnnnnnnnnnnnnnnnnnnnnnnnnnnnnnnnnnnnnnnnnnnnnnnnnnnnnnnnnnnnnnnnnnnnnnnnnnnnnnnnnnnnnnnnnnnnnnnnnnnnnnnnnnnnnnnnnnnnnnnnnnnnnnnnnnnnnnnnnnnnnnnnnnnnnnnnnnnnnnnnnnnnnnnnnnnnnnnnnnnnnnnnnnnnnnnnnnnnnnnnnnnnnnnnnnnnnnnnnnnnnnnnnnnnnnnnnnnnnnnnnnnnnnnnnnnnnnnnnnnnnnnnnnnnnnnnnnnnnnnnnnnnnnnnnnnnnnnnnnnnnnnnnnnnnnnnnnnnnnnnnnnnnnnnnnnnnnnnnnnnnnnnnnnnnnnnnnnnnnnnnnnnnnnnnnnnnnnnnnnnnnnnnnnnnnnnnnnnnnnnnnnnnnnnnnnnnnnnnnnnnnnnnnnnnnnnnnnnnnnnnnnnnnnnnnnnnnnnnnnnnnnnnnnnnnnnnnnnnnnnnnnnnnnnnnnnnnnnnnnnnnnnnnnnnnnnnnnnnnnnnnnnnnnnnnnnnnnnnnnnnnnnnnnnnnnnnnnnnnnnnnnnnnnnnnnnnnnnnnnnnnnnnnnnnnnnnnnnnnnnnnnnnnnnnnnnnnnnnnnnnnnnnnnnnnnnnnnnnnnnnnnnnnnnnnnnnnnnnnnnnnnnnnnnnnnnnnnnnnnnnnnnnnnnnnnnnnnnnnnnnnnnnnnnnnnnnnnnnnnnnnnnnnnnnnnnnnnnnnnnnnnnnnnnnnnnnnnnnnnnnnnnnnnnnnnnnnnnnnnnnnnnnnnnnnnnnnnnnnnnnnnnnnnnnnnnnnnnnnnnnnnnnnnnnnnnnnnnnnnnnnnnnnnnnnnnnnnnnnnnnnnnnnnnnnnnnnnnnnnnnnnnnnnnnnnnnnnnnnnnnnnnnnnnnnnnnnnnnnnnnnnnnnnnnnnnnnnnnnnnnnnnnnnnnnnnnnnnnnnnnnnnnnnnnnnnnnnnnnnnnnnnnnnnnnnnnnnnnnnnnnnnnnnnnnnnnnnnnnnnnnnnnnnnnnnnnnnnnnnnnnnnnnnnnnnnnnnnnnnnnnnnnnnnnnnnnnnnnnnnnnnnnnnnnnnnnnnnnnnnnnnnnnnnnnnnnnnnnnnnnnnnnnnnnnnnnnnnnnnnnnnnnnnnnnnnnnnnnnnnnnnnnnnnnnnnnnnnnnnnnnnnnnnnnnnnnnnnnnnnnnnnnnnnnnnnnnnnnnnnnnnnnnnnnnnnnnnnnnnnnnnnnnnnnnnnnnnnnnnnnnnnnnnnnnnnnnnnnnnnnnnnnnnnnnnnnnnnnnnnnnnnnnnnnnnnnnnnnnnnnnnnnnnnnnnnnnnnnnnnnnnnnnnnnnnnnnnnnnnnnnnnnnnnnnnnnnnnnnnnnnnnnnnnnnnnnnnnnnnnnnnnnnnnnnnnnnnnnnnnnnnnnnnnnnnnnnnnnnnnnnnnnnnnnnnnnnnnnnnnnnnnnnnnnnnnnnnnnnnnnnnnnnnnnnnnnnnnnnnnnnnnnnnnnnnnnnnnnnnnnnnnnnnnnnnnnnnnnnnnnnnnnnnnnnnnnnnnnnnnnnnnnnnnnnnnnnnnnnnnnnnnnnnnnnnnnnnnnnnnnnnnnnnnnnnnnnnnnnnnnnnnnnnnnnnnnnnnnnnnnnnnnnnnnnnnnnnnnnnnnnnnnnnnnnnnnnnnnnnnnnnnnnnnnnnnnnnnnnnnnnnnnnnnnnnnnnnnnnnnnnnnnnnnnnnnnnnnnnnnnnnnnnnnnnnnnnnnnnnnnnnnnnnnnnnnnnnnnnnnnnnnnnnnnnnnnnnnnnnnnnnnnnnnnnnnnnnnnnnnnnnnnnnnnnnnnnnnnnnnnnnnnnnnnnnnnnnnnnnnnnnnnnnnnnnnnnnnnnnnnnnnnnnnnnnnnnnnnnnnnnnnnnnnnnnnnnnnnnnnnnnnnnnnnnnnnnnnnnnnnnnnnnnnnnnnnnnnnnnnnnnnnnnnnnnnnnnnnnnnnnnnnnnnnnnnnnnnnnnnnnnnnnnnnnnnnnnnnnnnnnnnnnnnnnnnnnnnnnnnnnnnnnnnnnnnnnnnnnnnnnnnnnnnnnnnnnnnnnnnnnnnnnnnnnnnnnnnnnnnnnnnnnnnnnnnnnnnnnnnnnnnnnnnnnnnnnnnnnnnnnnnnnnnnnnnnnnnnnnnnnnnnnnnnnnnnnnnnnnnnnnnnnnnnnnnnnnnnnnnnnnnnnnnnnnnnnnnnnnnnnnnnnnnnnnnnnnnnnnnnnnnnnnnnnnnnnnnnnnnnnnnnnnnnnnnnnnnnnnnnnnnnnnnnnnnnnnnnnnnnnnnnnnnnnnnnnnnnnnnnnnnnnnnnnnnnnnnnnnnnnnnnnnnnnnnnnnnnnnnnnnnnnnnnnnnnnnnnnnattatgcttgttatgttactatatcatttttccggtgtggaataacatcaaaatcaaagtaataaagttacttgcatgttactctaaccataattccagttaagtcgaatatggtttcatgttttgtaaaacaatttagatcctctttatcaaagtgtgtctgtcttttacacaagttttttcactttattctatttccccagaatcaattgttgtgttattcatgttattaaattagttcgataactaccatgtcgatcattgttagttttgtttccaccattgttgggagtacgtatatactattactttatgattaaacgtgttacttaaattgcagaaaaaaactctttataatgaattacaattgtttataactacaacaattatattgagtcaatttaacactcatcaaaggcagaaaagctttactttaagattagacagaggctcataccaatcatggcggtggttataattagacacatcagcaactgtaaaagatcttgcacggccacagaaaaaaaaaatgcttgatgcacatctgataaactcactcaaggtctatgtattaatagtgtaaaagagagactgaatattaaatgataaaaatataaaataattgttttgtattggcagagtacacatatatatgcccaaatgtagattcaaagttcaaacattttgggactagatcatccctcctagtcatagccatctgaattggatcgaccccaccccaaggtttgtgttgcatcacttgcatgcattcacccaccactgttgttgttatagttttctcgtgatttttgtattggaaaatactatggacaaatataattgatacagtcataattaattattgtcatgttgcaattacaaagactcctcaaagaaaatgtttagtaaatcatgatcaagtagaaattgcaatggcaaactgttttttaaaatcttattagtcagttgtataaacccaaatttagttatatccaggtatgtaatatttgccattttagtgctctgtttggaaatttgcgtgtcgaattgttttttttatacgtacctacacaacactctttagccaaataccactgttcatggaaaaatctgtcctgaaaggagtatagaaccagaaacaatatgcgtggtggtatctatcattctgaaaaagaaaaaaagtgggattcttacaatagtaggactgtgacactactagaaaaatctatgcacctttgatgtccctaaatttatgaacaaaagattcaggtgtcgtttattgaatttgttttatatggagtgtaaagtcatattcaatactaataagtgtatgtttatataattctttttaaaataattactcttctttatttacatctaataaaaatgttatcacattaaaatttttaaaataagctaaatgaagcatgtttcataagaaattaacttttactgtaattgatacattttttagtgacaaagggagatgggtgaagacggtgaaggaaaaaaaaatgaagataatgtctatgttgttcaaataacagtattaattgtattaaaatagttaatattaaaaaataaattagtaaatataacattgttgtgttggtgctatttattgtgcatcaaaatatgtaaaaataataattaacttgtaatttgtatagttggtatgggttgttttatctatcctggattttgttgaatcacacatataatcatttatatatatatatgggctactattgtcactaccaaaaatgctatggagactaccaaagcatttgaaattacttggttatccttagttccaattccccacacctcctatccttcccctccttacgttcagctactctccttctttacatccaaaaacagaatttaaataaggctctcaaatttgaaaaaaaaaagaagatagcaatgactacaaattgatcaacctgccaatacaatgataaaacttcggagtattctaagcaacactaaacagtgatactacctgagcgaaaagattgaagtttgaaccacacatgatcaaggaaatgaaaataggcataccgcgcgccatgatctacaaatcagcaaaggagcaatcactatccagaatcccacaataaatccaattgtcatactgacaaaaaaccaattcactccatgcccatcacttccttcataactatgggttttcccattggagctgcagtttatgggcagtggtggaccacatagattgttgccgatgaagctggaggcatcaaaggtttgcaattgagttcctgttggaatatttcccttcaaatgattgtatgacaagtctagcatgctcagaaagctcaaatttgcaatgcttggagggatttcaccaaaaagttgattcctcgaaaaatcaatggactgtaatgatctcatattacctataccttgtggaatatgaccaatcaattggttgtgggacatgtttaaaaaattcaatccatttagatatgtgatttctcttggtatttccccaaataacttgttacttgacagatcaatgcttgttaccaaacccagaatgtttctgtactcatctcctcttcctttcagccatagtagcacactaactatactttccgtggcagagtaagacacaaaatattttccttgagaatagatacgaggatctgtactttggttctttagtgtcatggcactcaagttactgaaacagctcggtatattgccagacagattgttttgtgcaaggtctaaaacctgaagatgactcatctgacatatttcatttggataggtgggtcaaagaaggaagagattggagagtgtgtagccaatgaaatgctttggataggtttgtataactcaaataaagatagaccaaattggagagattcccaatctgagatggaatcttccccatgaatccagtataagagaggtcgaggtgagtcaaggaggtcattgtcccaaggaaagaaggaattgccataccttcaaaatcattgtcgctcaagtcaagatatcgaagcttagagagattcccaatctgaggaggaatcttcccatagaatccagtataagagaggttgaggtgagtcaaggaagtcattgtcccaaggaaagaaggaattgacataccttctccaagtaaataattgccgctcaagtccaagtaattcaaatgctttaaatcagccaaacaaggacttatctctccaccaaagctccatctccgataagcttcccaatttgcataatcagaatctgaagtgttgaggtgaagctgaagaagatgggaagtaaggttgtggcagaggactccataccagtggcaacagttggaattattatgattccatgaccaaagcctatttgaaggatcattcagattattcttaaacttcaaaagtgtctcacgctcacttgggatgcacacactctctctgcatggtaagctcaacaaccaaagctggacaaagacaagaatataaatggaggaattcatgatcacacaagaatatatagaaaacaagtgtagttgttggttctgcatataaatcatcaaacttctattatttatactgctgccctgcctgtttttttctccactttcattattttttaccttttttattattgtgccaaatactaaaatattcttccattcttttttttacgctggcctctttaaattatcgacttaattatccaattctcccgaattaattcttagaatacgaaattttttgtatttactgtatctatctccctttttaaaattcctatatacactaaattcataaaaaaaaatcaaaattaataacaaagaaatatgatttattcttgtgctgaatactaacataagtccaatatttttttaagaaaaaaatcaagtcttctatttcatcaaatcccaacccatgattaatattaaattatcaaattttcatattcaaactaaaaataatgtaaagaaattgtcttctaaatcatagctcacaccatcagtatctcaaggttttcatttttcatctgannnnnnnnnnnnnnnnnnnnnnnnnnnnnnnnnnnnnnnnnnnnnnnnnnnnnnnnnnnnnnnnnnnnnnnnnnnnnnnnnnnnnnnnnnnnnnnnnnnnnnnnnnnnnnnnnnnnnnnnnnnnnnnnnnnnnnnnnnnnnnnnnnnnnnnnnnnnnnnnnnnnnnnnnnnnnnnnnnnnnnnnnnnnnnnnnnnnnnnnnnnnnnnnnnnnnnnnnnnnnnnnnnnnnnnnnnnnnnnnnnnnnnnnnnnnnnnnnnnnnnnnnnnnnnnnnnnnnnnnnnnnnnnnnnnnnnnnnnnnnnnnnnnnnnnnnnnnnnnnnnnnnnnnnnnnnnnnnnnnnnnnnnnnnnnnnnnnnnnnnnnnnnnnnnnnnnnnnnnnnnnnnnnnnnnnnnnnnnnnnnnnnnnnnnnnnnnnnnnnnnnnnnnnnnnnnnnnnnnnnnnnnnnnnnnnnnnnnnnnnnnnnnnnnnnnnnnnnnnnnnnnnnnnnnnnnnnnnnnnnnnnnnnnnnnnnnnnnnnnnnnnnnnnnnnnnnnnnnnnnnnnnnnnnnnnnnnnnnnnnnnnnnnnnnnnnnnnnnnnnnnnnnnnnnnnnnnnnnnnnnnnnnnnnnnnnnnnnnnnnnnnnnnnnnnnnnnnnnnnnnnnnnnnnnnnnnnnnnnnnnnnnnnnnnnnnnnnnnnnnnnnnnnnnnnnnnnnnnnnnnnnnnnnnnnnnnnnnnnnnnnnnnnnnnnnnnnnnnnnnnnnnnnnnnnnnnnnnnnnnnnnnnnnnnnnnnnnnnnnnnnnnnnnnnnnnnnnnnnnnnnnnnnnnnnnnnnnnnnnnnnnnnnnnnnnnnnnnnnnnnnnnnnnnnnnnnnnnnnnnnnnnnnnnnnnnnnnnnnnnnnnnnnnnnnnnnnnnnnnnnnnnnnnnnnnnnnnnnnnnnnnnnnnnnnnnnnnnnnnnnnnnnnnnnnnnnnnnnnnnnnnnnnnnnnnnnnnnnnnnnnnnnnnnnnnnnnnnnnnnnnnnnnnnnnnnnnnnnnnnnnnnnnnnnnnnnnnnnnnnnnnnnnnnnnnnnnnnnnnnnnnnnnnnnnnnnnnnnnnnnnnnnnnnnnnnnnnnnnnnnnnnnnnnnnnnnnnnnnnnnnnnnnnnnnnnnnnnnnnnnnnnnnnnnnnnnnnnnnnnnnnnnnnnnnnnnnnnnnnnnnnnnnnnnnnnnnnnnnnnnnnnnnnnnnnnnnnnnnnnnnnnnnnnnnnnnnnnnnnnnnnnnnnnnnnnnnnnnnnnnnnnnnnnnnnnnnnnnnnnnnnnnnnnnnnnnnnnnnnnnnnnnnnnnnnnnnnnnnnnnnnnnnnnnnnnnnnnnnnnnnnnnnnnnnnnnnnnnnnnnnnnnnnnnnnnnnnnnnnnnnnnnnnnnnnnnnnnnnnnnnnnnnnnnnnnnnnnnnnnnnnnnnnnnnnnnnnnnnnnnnnnnnnnnnnnnnnnnnnnnnnnnnnnnnnnnnnnnnnnnnnnnnnnnnnnnnnnnnnnnnnnnnnnnnnnnnnnnnnnnnnnnnnnnnnnnnnnnnnnnnnnnnnnnnnnnnnnnnnnnnnnnnnnnnnnnnnnnnnnnnnnnnnnnnnnnnnnnnnnnnnnnnnnnnnnnnnnnnnnnnnnnnnnnnnnnnnnnnnnnnnnnnnnnnnnnnnnnnnnnnnnnnnnnnnnnnnnnnnnnnnnnnnnnnnnnnnnnnnnnnnnnnnnnnnnnnnnnnnnnnnnnnnnnnnnnnnnnnnnnnnnnnnnnnnnnnnnnnnnnnnnnnnnnnnnnnnnnnnnnnnnnnnnnnnnnnnnnnnnnnnnnnnnnnnnnnnnnnnnnnnnnnnnnnnnnnnnnnnnnnnnnnnnnnnnnnnnnnnnnnnnnnnnnnnnnnnnnnnnnnnnnnnnnnnnnnnnnnnnnnnnnnnnnnnnnnnnnnnnnnnnnnnnnnnnnnnnnnnnnnnnnnnnnnnnnnnnnnnnnnnnnnnnnnnnnnnnnnnnnnnnnnnnnnnnnnnnnnnnnnnnnnnnnnnnnnnnnnnnnnnnnnnnnnnnnnnnnnnnnnnnnnnnnnnnnnnnnnnnnnnnnnnnnnnnnnnnnnnnnnnnnnnnnnnnnnnnnnnnnnnnnnnnnnnnnnnnnnnnnnnnnnnnnnnnnnnnnnnnnnnnnnnnnnnnnnnnnnnnnnnnnnnnnnnnnnnnnnnnnnnnnnnnnnnnnnnnnnnnnnnnnnnnnnnnnnnnnnnnnnnnnnnnnnnnnnnnnnnnnnnnnnnnnnnnnnnnnnnnnnnnnnnnnnnnnnnnnnnnnnnnnnnnnnnnnnnnnnnnnnnnnnnnnnnnnnnnnnnnnnnnnnnnnnnnnnnnnnnnnnnnnnnnnnnnnnnnnnnnnnnnnnnnnnnnnnnnnnnnnnnnnnnnnnnnnnnnnnnnnnnnnnnnnnnnnnnnnnnnnnnnnnnnnnnnnnnnnnnnnnnnnnnnnnnnnnnnnnnnnnnnnnnnnnnnnnnnnnnnnnnnnnnnnnnnnnnnnnnnnnnnnnnnnnnnnnnnnnnnnnnnnnnnnnnngtatagaattgcttaaatcaatgaaatttttattttaagaaaatattaatgatttttacatcaaaggtaattaaatttggcttaattagtcttcaaattttaactattattcaaatcaatcctttcgttaaacctgtacatgttaagtaaacaacaaaaaatcttgccttataaaattcaaacattttattacatgtggtttgaacccataattaattttaaactatcaaattttaattattcaaaataaaagaaatgaaaacaaaattgactcctagacaaaccgctggccacctgattgttgccatttatttcttttactcttttttttggttcttttattttgtccaactttaactttaactttaattagtgaggctcacgcggatttgtgctttttaaactttcttttcattttaccttactttctgtgtaacaaccaagaggaaacattcaacacgcaaagatgaattcaaaattcaacacggattcaaattatttaaagaccactgtgtagcagcaattgtttatgaagtttcaaattatttaaagaccactgtgcaagaagaaacattcaacaggcaaagatgaatacaaaatttcatttttaaagatcactctgtaaaagagacgacgtctaaggtggatcattgttggaaacaaatttggcagctgtttttttattatcttgtacaatccccagcgttttctctgaaaactaaaccttggccaattctgaacaaatgaattatgatcggtttggttttgtatattttttttcatctcaaactatttttttttatgagaactaaataagaattaaataaataattaaacaaattcaaaatgtcacattttctagactcttcccactactcaaatctcacattaattaaatcattcatttctaaactcactactatcctaaagtagtaaagtccctctcatccttcataattccctttaaatctattgagtaaagatagagacagaataaagaataattcgaataaagacagtaatggccgatggcgtgccgttttgtgcattatatgatgtggtccacaatttgaaacatatataaattatattatatatgtctaatttatattatggaaaatcataataaaggtctaattatattattgaaaatactatttttacatttcacaagataaatgtcttatttattatgtctaatataaattatactagatgaatgtctaatttatattattgaagttcaatgaataaatatttttgcatatataaaattatatcttggattttataacaaacaatttaaattgtgaaaataaattacccttcaccagcagcaaggtcgaagcagcttttgtagcactgagggaagcaaaggttttgtgtgaaaccactttccataagagaattgatgagattccaaaggattttctgtccaaccaacaagccttgatgcatttctcactttcagtatgccccttaatttgtttttcagccgaagtcctgcacgtgtaagcttcttcccctgttctcttcacatgctaagaacatatttttaaagggaaattcttgttgttaagaatttgtacgtgtatgcaacactttgaannnnnnnnnnnnnnnnnnnnnnnnnnnnnnnnnnnnnnnnnnnnnnnnnnnnnnnnnnnnnnnnnnnnnnnnnnnnnnnnnnnnnnnnnnnnnnnnnnnnnnnnnnnnnnnnnnnnnnnnnnnnnnnnnnnnnnnnnnnnnnnnnnnnnnnnnnnnnnnnnnnnnnnnnnnnnnnnnnnnnnnnnnnnnnnnnnnnnnnnnnnnnnnnnnnnnnnnnnnnnnnnnnnnnnnnnnnnnnnnnnnnnnnnnnnnnnnnnnnnnnnnnnnnnnnnnnnnnnnnnnnnnnnnnnnnnnnnnnnnnnnnnnnnnnnnnnnnnnnnnnnnnnnnnnnnnnnnnnnnnnnnnnnnnnnnnnnnnnnnnnnnnnnnnnnnnnnnnnnnnnnnnnnnnnnnnnnnnnnnnnnnnnnnnnnnnnnnnnnnnnnnnnnnnnnnnnnnnnnnnnnnnnnnnnnnnnnnnnnnnnnnnnnnnnnnnnnnnnnnnnnnnnnnnnnnnnnnnnnnnnnnnnnnnnnnnnnnnnnnnnnnnnnnnnnnnnnnnnnnnnnnnnnnnnnnnnnnnnnnnnnnnnnnnnnnnnnnnnnnnnnnnnnnnnnnnnnnnnnnnnnnnnnnnnnnnnnnnnnnnnnnnnnnnnnnnnnnnnnnnnnnnnnnnnnnnnnnnnnnnnnnnnnnnnnnnnnnnnnnnnnnnnnnnnnnnnnnnnnnnnnnnnnnnnnnnnnnnnnnnnnnnnnnnnnnnnnnnnnnnnnnnnnnnnnnnnnnnnnnnnnnnnnnnnnnnnnnnnnnnnnnnnnnnnnnnnnnnnnnnnnnnnnnnnnnnnnnnnnnnnnnnnnnnnnnnnnnnnnnnnnnnnnnnnnnnnnnnnnnnnnnnnnnnnnnnnnnnnnnnnnnnnnnnnnnnnnnnnnnnnnnnnnnnnnnnnnnnnnnnnnnnnnnnnnnnnnnnnnnnnnnnnnnnnnnnnnnnnnnnnnnnnnnnnnnnnnnnnnnnnnnnnnnnnnnnnnnnnnnnnnnnnnnnnnnnnnnnnnnnnnnnnnnnnnnnnnnnnnnnnnnnnnnnnnnnnnnnnnnnnnnnnnnnnnnnnnnnnnnnnnnnnnnnnnnnnnnnnnnnnnnnagaggtggcctgtcagaaaattgtaaattaaatcaaacatggatagaatatgctgggagccgtaaatgagtatttaattaagaagttgattggctttaaaaacttacaagagttccttattatataaaacttgaaaaagcaaaatgaataatacttaaaaatttagaatattactccaacaattttgttggttctcaagcatcattggttatctatggatatctcatcaaagttcttggcctggccggcttggagagtcaagtcttgtatgcagccacgagtcacgactttaattaacacgaaagaactaattattcacttcaatggttagtgactaaaattaaatataagtttttttcctattaaaccacgttttcttgaaccactagtcccccatttttggaaacaagaatgtgatacacagaattgaacaactagttgatcttaactacaaatatgctcaatatgcaaatatgtacatcccaaatcataatttaaataagactctcaaattttaaaaaaaaaaaaaaaaaaaaaaagatagcaataactacaatgcaaattgaacaacctggcaatacaatgatacaacatcggttgtaagcaacactaaacagtgatactatacgaggaaaaagattgaagtttgaaccacacatgatcaaggaaatgaaaataggcatgccgccatgatctacaaatcagcaaaggagcaatcactatccaaagtcccacaacaaatccaattgtcgcactaacaaaaaaccaattcactccatgcccatgacttccttcataactatgagttttcccattggagctgcagtttatgggcagtggtggaccacatagattgttgccaataaagctggaggcatcaaaggtttgcaattgtgttcctgttggaatttttcccttcaaatgattataagacacgtctagcatgctcaaaaagctcaaattagaaatggttggaggaatttcaccagaaatttgattcctcgaaaaatcaatggtttgtaacgatcccatattaccaataccttctggaataggaccaatcaattggttgtgggacaagttcaaaaagttcaatccatttagatctgtgatttctctaggaatttctcctaataatttgttacttgacagatcaatacttgttaccaaacccagaatgtttccatactcatctcctcttccttttagccatagtagcacactaactatacctaataccgaagagtattctgtattatttggtgcatgagaatagatttggggatatggactccggttcactagtgtcatggcactcaagttacggaaacagctgggtatattgccagacaaattattttttgcaaggtctaaaacctgaagaagactcatctgacatatttcatttggaatgtgaccggaaaaactgtttgatcgaaggcggaggattttcatatttgagagcttttctccaacccatgttggaatacatcctgaaagattattttctccaagatccaaggatatcaattggctagtcttcttcaaactggtaggaaatattcccgagagcaagttgttacgaatttctaatgactgcagctcagccaaggaacccatggatggggggaagttcccaacaaaatggttgctttgtaaattcacttccactagaaatggccaattaatccaacaatcaggtatttctcctgacagattatttgatgcaagattgagaatttctaattgcattggcttgtccagattgttacataaaaaatcttgcatggattcagagaatgaattggttgaaaggtctaacttatacacatcatttgaaagattgggtaatttaccacataagtgatttgtgcttagatcaacagtttggatagatattggattttttattgtagtcacaagctcaccatggatatgattatgagagaggtttaaatacaaaacctgagagtgtggttcccagaaccaagtgggaatagaatctaaaatccccgtgttagacagtccaacatattgaagtttgttttgtgactgaatccacgatggaaagttgggacctatatgccatgatgtcacatccaaataggtaagttgaaaattaggaatccaatgaggacctacttttaaagttaaattgttccctgatgcatcaaactccttcaagcttgtaagatttgcaagatcatcttcgttgacaactccttgaaaattattgccatcaataagaagcgttgacaatttagagagtgatccaagactttcaaatggatttccactgaatttattaatagagagatagagatatgttaaatctgtctcccataagttgcggagatttcccaaaaaagtcggaattgttccttcaagttgattacgtgataaatcaagttcaacaagagaagtcaaatttcccaaagaagttggaatggttccttcaagttgattatatgacaaatcaagttcaacaagagaagtcaaatttcccagggcatcagaaatagtcccatgcaagttgctggaacttaggtccaaagacttgagacgatgaagaccgtataagcaatcaggtatagaagatgagaatgaattgaaagacaagtcaagattttgcagagatgagaagttgagcaaggatggttcattatagtgagggagtttgcagtgtgacaaatataggtgggtcaaagaaggaagagattggagagtgtgtagccaatgaaatgctttggataggtttgcattactcaaataaagatattcaagcttccacatacttgatacccattctacattttcagcaaacagatcataactacctccaaggccaagatagagcaaattggagagattcccaatctgagatggaatcttccccatgaatcgagtataagagaggtcgagatgagtcaaggaagtcattgcacaaaggaaagaaggaattgacataccttctccaaggaattcattgcagctcaagtcaagatatcgaagcttagagagattcccaatctgaggaggaatcttcccacggaatccagtatcagagaggttgaggtgagtcaaggaagtcattgtcccaaggaaagaaggaattgacataccttctccaaggaaataattgccgctcaagtccaagtaattcaaatgctttaaatcagccaaacaaggacttatctctccaccaaagctccatctcctataagcttcctcatcgaatatacggtggaatccatcatcatagtagtaaagatataaagcagaatgtgaagtgttgaggtgaagctgaagaacatgggaagtaaggttgtggcagaggactccataccagtggcaacagttggtattattatgattccaagaccaaagcctatttgaaggatcattgagattattcttaaacttcaaaagtgtctcacgctcacttgggatgcacacactctctctgcatggtaagctcaacaaccaaagctggacaaagacaagaatataaatggaggaattcatgatcacacaagaatatatagaaaacaagtgtagttgttggttctgcatataaatcatcaaacttctattatttatactgctgccctgcctgtttttttcttcactttcattattttttaccttttttattattgtgccaaatactaaattattcttccattctttttttacgctggcttctttaaattatcaatttaattatccaattctcccgaattattctcccgaattaattttgatcaatttttcaattcacaaaataatattcttcttatatgtgaaaaagactaattaatcttcattgtcattaatgattgttgtgttgtctatttctaattgttttttaatcataatattattttctttttattaaaaattaattagtgagatacaaagaagtttaatttgatctatcataattattgagatcatagtttttccttttataagtcttggtccaaatttctccatgtattgtagatcatatttaacttaaaaagtaaattagaagatctacaaagaagtgtgacatgttttttaaattataaaattatggtcctagctatttattgttagaccacaagttttcatatattaaagtttttgtctaaatttcatttatggtgatagtttacgaataggatagaagacaaaaataaatattcaatttattgaaatatctaactcaattaattgatgaatacatcaattataggaaaagggtgtactttaaagattatttctattaaaaaatctataaatttttttttccttccaatctaattatttaattttaatcaatttttcagttcacaaaataatattctcttatataggaaaaaaagactagatttaattatcatcaattggaaaagttattgtgtcatctatttatagttgtattctaacttgaatattattttatttatcatataaaaattaattagttatataaaagaagtgaaaataatattaactttttttctcaaaaaaaaatcagtatcatattttatattttttacaagttatcaacttaaataagaggagaaacataattttaatttccattttactttttaaataattgcaagtgtcaaatttaaataatcatgagaatactcacgttcaatataatattctcaaaaaaaaatccatacgataacttaaacaatctataaagaaatataatttattcttgtgccaaatactaaaacaagaaacattttttattttagtttaccgtatagaattgcttaaatcaatgaaatttttattttaagaaaatattaatgattttttaaaactttaagtagtttacattaaagataattaaatttggcttaattagtcttcaaattttaactattattcaaatcaatcctttcgttaaacctgtacgtgttaagtaaacaacaaaaagtcttgtcttataaaattcaaacattctattacatgcagtttgaacccataattaattttaaatatcaaattttaattattcaaaataaaagaaatgaaaacaaaattgtctcctagagaaacccttgcccactccaccaaatccatatcaaggtccccacttttccaacttgaaccatagactactccatcaagtctatgtcaaggtcctccattttaaggtccccagttttccaacttgaaccatagactacttcaaccttaggacactccacaaagtccactaatattaaggtctctgccttcttcaacttctgcaacgcatatatagaaatcaacttaattgtataagtgcttcttgcttctgcatataaattataaaacttctattatttatactgctgcaagtgtctttcttgacttttttaatttttttattatgtttcctttttttaattattgactttattatccaattctcccgagttaattcttagaataggaaataattttgaatttactttatctatctccctttttaaaattcctatatacacaaaattttatattgaatttaactattatttaatctatcctttcgttaaacttttgttaattaaacaataaaagttcaacattttattaaaaaaattcaagtcttctatttcatggactccatcaagtcttttattaaaactccaacttttgttaattcaagtcttttaatactttaaatcaaaggtaattaaatttggtttgattagtcttcaaattttaactattatttaaatcaatcctttcgttacatctttgttaagtaaatgattgcatagcaagcaaggaggtgcaagcagtaacactctcacaaagataaagatctcaaagccatcattttttttttccttttcttttctatgaactgtcatttcttatctctacatgtgaatgtcatgcagacaaatgatgtccaagctccactttttccattcattgcaagttgtaagcagaatgtagaatgtacgtataataaaataatgagaatgccaactactagtacgtagtacttaattaaaacaaaagtatcaaaattagaacgaaaataactttgatgctgttaatacatgagtttaattttgatacacagtgtaaaaagttaaattgttaattaattagaaatcacctaatgatttgtaaaacaattactaaaaaaagtttcatttgaaacttagtcttccacccgtctcaagctctccacatgaaaaaaaaggttgtttgtgtcatctatttctaattgtattcaaacctaaatatgatttcctttatcatataaaaattaattattgataaaaaaagaagtggtgaaaaagaatttaacttttttctataaaaaatagtatcatattttgtattttttataagttatcaacttaaataataggagaaacataatttttattttcattttactttttaaataattgtaagtgccaaatttaaacaatcataaaatactcacgttcaatataatattctaaaaaatatatttatacgataacgtaaataatcttctacaaataaatatattttattcttgtctcaaatactaaaataagaaacattttattttaatttacagtataggatttcttaaatcaatgaaatttttattttaagaaaatattaataatttttttaaaactttgagtagtttacagcaaaggtaattaaattcgacttaattagtcttaaaattttaactattatttaaatcaattaatcctttcgttaaacctgtacgtgttaagtaaataacaaaatgtcttgccttataaaattcaaatattctattacttgcagtttgaacccataattaattttaaaatatcaattttttattattccaaataaaagaaatgaaaataaaattgtctagtctcctagacaaaccacttcccactccaccaaattcatatcaaggaccccacttttcccacttgaaccatagactactccatcaagtccaagtcaatgtccttcatttttttaatcttgaaccttaggacactccacaaagtccagccaaccatatttaggtctctatcttcttcaacatgaaccataggtcaatacattaccttcatatcaagttccatatcattgacaacaaatgtttagaattaagtaagcaaggaaaaaaattataaatgatgaatacatcaattataggaaaatgatctaatttaaagattatttcggttaaaaaatctatataaaaaaagactctttcgtttcaatctaactatttaattttgatctattttttaatttacaaaataatattcttcttatatgtgaaaaaaaaactaattttcattttcattaatcagaaagattgttgtgtcgtctatttctaattgtattttagcctgaatattatattttttttcattaaaaattaattagtaagatacaaagaagtgtaaaatgcttgtttaacttggtctacaataattattgagatcataacttttttcttttataagtcttggtccaaatttctccatatattgtagatcatatttagcttaaaaagtaaattagaagatatgatataccaagaagtgtggcatgtttttctaaattatttatctatggccttagctattttattgttagaccacaagtcttcatatattaaagtctttgtctgaatttcatttacttgtgtggtgatattttaagaatagtgatagaagagaaaaataaatatataatttattgaaatatctaacttatgaagatttgcattcttaatgcataagcttttcagtttatatattatcattatttggaaatattaatttgttgtgttaattgtctatttctaattaatttgaaaatgaatcttaattttttatcataaaaattagtatcatattttttattttctttacaagttatcaacttaaatactaataggagcaacataattttaatttccattttattttttaaataattttaagtgtcaaatttaagcaatcataaaaataatcacgttcaatataatatttttaaaaaataattcatgagatcacttaaataatctacaaagaaatataatttattcttgtgccaaataaacaacaaaaaaagtcttgtattattaaattcaagtcttctattacatgcaatttgaacctataactaattttaaatgatcaaatttttattattcaaaataaaataaaagaaaaaaaaattgtcttctagacaaaccacagacaactccaccaaatccatatcaaggtccccactttttcaacttgaaccataggccactccatcaaatctatgccaaagtttcttatcattgacaataaatgttgagagttaagtcaagcatgaaaaaaaatagggtaaaatatatcatttctatccctataaaattttaatgtgctacttttttttttatcctgagttaagtttggatgatagataattatcatgtattcttagattttggtgtctatccctataaaaaggttcttatatttacaatttttttatcttttggtcctcgaggggaagattcaattcacacataaacatgaacacaattaataaaaatagggaagcaagcacaggtacaaatgaagtgtaatggaggtatgagacaaagccactacacattccattattcttgagtctgccaccgacctctgcaagcttagcatttgccaattgccatgatgtaatctccttcttgacagtctctcatcaagttggagtgatatcacagcattgaactaagttgatcgttccaatgggatgatggttttgattgctgcagataaagtgtgtgattgtgagtttctggtcccatgagttaaactacatcgactaaaaaaaatattgtcgtaactttaagggtcaaaaggataattaaaccttttatttttttattactttttttaacaacgcgttatatatatgtagcagtttattctaaacaatggactacgtgtgaaatctttgaattctatgtaagaaatgttatttcaaacttctcatcagtcttcatgtcaatgatggcatgctccatttgaattctatgtctaattaagctctcggtcttccgtttttgcaactttatttcgtagaaagaagccaaatttgaagatacaacatttgatactataactgtttggtgttttgaaaatctcactcacatatttccaaatgttacaaaagaatttgattcagtgggttttacgaattccttcctagccttttttaccaaatcagggaatttgcattgttgtgcatgatggctgccacaaggaccattgtaccaacccattagtgcaagtgattttttcttatgagaattgagaaacaaattatatatgtgttttataaagggaattctattatttttaattttgaacttgtaatgtttttggtttccctcacagaacaagtgatgtgactcttgatcgacgccatacgtacgcatactttgatgctcttttttcacaccacttttatcttaatggtatctcaagttgacaatcataaattaaaatagctaactatagttgattagtagagacaaacagctcaaagataaagatctttaagccatcattttttttcccttttcttttctatgaactgtcatttcttatctctacatggaatgtctagaagttgaaaattacttgagctttctttacctactgctttccattttggcgaactgcttttctttctcataatgaactttccacttccaatgatggttgaacattaataattcttcatctattttgtctaaaaatttccactcacttttggtgagtggtgtgaatgtcatgcagacaaatgatgtccaagctccactttttccattcattgcaagttgtaagcagaatgtagaatgtacgtatagtaaaataatgagaatggcaactgctagtactacttaattagaacaaaagtatcaaaattaaaacgaaaataactttgatgctgttaatatatgagtttaattttgatagatagtgtaaaaatttaaattgttaattaattagaaatcaccaaatgatttgtaaaacaattagtaaaaaagttataggaaatatatataattaattaattgcaaatgaaagtgtatttaaattaaattcttaattaacatatccttattgtgatattttgtatattttttatttaattgagacagtggaatgagaccgcactataattttcatcacggatgtggttgtctaatataatagggatggttggtgaggaattttggaatgttagttggttttagactatatatcctcttgttcagttttcacattctcattagagttaagttgctttttggggaagcaccaatgtcttgaaattccctcttcaccagaagcagttttattgtgtctttatcgaagtcatcttctccagagacttgcctttaactttgaagataggaaatagatcagtcaaacattgtttcagtttatttggattttttttgaaggacatgtgatttacaaagacttcttacaacttacaactcacaacctttggaatttcagctgatctcatattttatttagcaaatttttctcatatattaagtcttaggtttttaaaattataaagctaaaacaaaaatgttttactaaatgtattttaaagtaaattttacacacaaaaatattatgattttataaaaattgtttggtcaagggagacatattgagccctcctaactataagctaccctgagggtttctatctttctttttcccacttaattttttactttggcagcaagggttaaacctaccacatctacatgactatgtcttactttccaataagttacacctaaatagctaacatattcctcttgctcacgcacactatctttcgtaaacttttcacgatcatctttatattatcaaattcatttaattaaatatacaattatcttaatattataagcaagtctctgtataatcatgtagtgtttctaaattgaatgagcctaaatcacacaatcctgaaaaaaaaaagagtcctattgtcaaaatagccgtaaaaagatagaaatactatcttgatatactataaccttaatttttacaataaacctaaatgtctaaatatcataactcaaccatgcgacgaaatgacaatgtgttaattttgttttgtcctcaaccatgcttatgcctcaggccgagggaattctcacacaccattcctaacaatttctaaggaattccacaacgtgtctatgcttcagacaacaataacgtacgaaataaacaagtagcatctaataacgttaaaataagcacacacatatatcgagccaaccaacgttggaggtagaagaacaacaataatatcaatatttaatttcatttagggttaatttattaggaactcaatgtaaaataataatttattagaaaacaaacacaaaatttgagtatttattaagaataaaaacatatttaatttcatttagtgtttaatagtgttttggtctatgtttttttgtctaatagtaggtgtggttgtgtaggtgtgtttttttgttgagaaaatctttatataattatgagctatgataaaatcaaaaatccatgatgagttccgtatttaaaaatcgttgtagaattatagggttgattaaaatgaaacgtatttgtcattgagtgcatattaaaatgaaacgtacatgcattacaataaataaaacatttaaactttaattttaatatagaatttttctaaattgttatggtgcatgattaaactttaatcatggagtacacattttttccttatataagtaacatggttttacgtgatttgtttattatttatcttttcttctagttgtgttcattgttgtttgaaaattttctttaatattttgttgtttggacaatcacttagttacaccttatgaaattcacggattggtttgcaggcttgactatcaaatttcatctcgcatcagattaaacatcgcattactataccatatagttatatgtgattttttcccattcaattttatatttagcacacattaaaattaatttataccaaattttttgcatataggttttttttagtgaatcaaattcttttttaattcaaattgggacattagttttcgtatccgttaagaataattgatacctaatttaaataattgtattaaattctaattataaaaaaatcccgtatttattatcataaaaatatttaacaatttaatcattaatttcgtagtataattgatactggacaactaatatttattgcacttaatttcatttgataataactgatatttcttcaatcgcgtatcatttgttgcaaaacgaacatccaatatcattggagaacaatgttgatgtaacgattaattcattgataatcacatgaatgtattaaatccagatactaaatttacaaataattttttgtttttcaattatattttaacaataattaagaaataaatctaaatcattctacatttacatttgtttataggtatttgggatattggccggagatgctatatgggaatctaaattttgcttaacacaaatgtggtatgcaaggaaaaatcaaattgaaataattttaaccaccacttcaaatttttaaaagatttgtttcaaaataaggatatgaagaacaaattgtttttagagaacatttcctccatgatgttttcctttcctttaggtgaaaaaaaaatagacatttccaaaaataatgaaagtgcatttatataatgttgtttatatagagaagtctttgaaaatataagtcaagtactattactacaaactattctgtatcatatatctcttatatattttgatataaaatatttattattttttttaatttcttagtaacatgtgcatgaaagtcaaatcaaaccgaatctgaggatttatgtggcatttaacttttatcaatttttgctctcaaagatcacactctaatcaagtaaaatagagacaaatttaaaagacaatgactaaattaaatatggatttggctattgccatattaacctcggagaggtaaaagatcattaataagtaataactttaataatagtaatagaaacagtagacttgtaagcataaagttgttcctaggaaaacaataagccacaaagaaatccccaagaatgtattcattcctaatccacaaagaaaagcccgtatgcgcttactgtgttgtcaatcccagagggctttccatgaatgatcttctccaaggaattttctataacaaaccaaagaactaaatataacaagctctcaacattactgaaatattctcaaaggaaagatctcaaagggatggcaagcctagtttttttttttttttttatcatagaaacattatagtttctccctagcaagaataatttgtgatggattgaaatttcctatatgtatctatgaacctgtggcataaagtttgtttttaagcacacatgacatgacatgataatacctagctttggattaccatgtgacaaaaaattactttcctaactttagtttccccgaaaggtaaaattaaccaaatctgaaaagcgtttcgtgtaatattggctacgcatgactaattaacttctgaaacggtcagctacttcataaccttttgatgtcattctccccaacaaaaaacaacttgttacctagcaacagcttgcttgcttgctttctcacgcacttagtgaccctctgtgcttgtgaaatatattgttataacctttattgtttttcatcaatattaccaaaatttccttaaaatgttcaatatttcgtaatcttcataattaattcaaaattctcaaaagattagtatatgaccttttttcttgtttgtactaggagaggaataaatgaaaaaaaaaatcagaaatttgtggattgctatttgctcatatgatgtgtctattagttctttgaaatttgtattgatcatatttatttttaccttttaatagatatattgtgctgtcatcccaagagaaggatcaaacattgatgatgcagaggtgctaagatattgcaagaagaatcttgcatctttcaaagtccctaaaaaggtcttcattactgattctttgcccaagactgccaccggaaagattttgcgtcgtcttgtggcaaaacactttgtctctcaaatttgagcaacccaagtcctacttttgaagcctccatacctggccatacatagttggagtccacacacataaatttcaacaataatttggcaacttggcatttaagaggagggtaattctgcaaatggtctttcatacaggatacaatagattgtagttttgaatattcacgtcaaatgttcacaatgtaatgttttcaatgttttatagatcttaaataccagtagcagacaagcatgtcatgcttatgcttttttgctatcgtgctcctgttccttgccactggtcttgatgaagccaagcattgtctctttgccttttaagttgtacataattgcaaaacggatacatgtaaaagaataaatcttattaaaggtaaggttgattttaaagtgggcaagaatgcatccatgatcttaagtaaataaaattcaagcgaatatgtggtttggattagagaatagtattatccagtgcacactaaattggagagattcccaacatgtggtttcaaaactcaagagtacttaccaactatttcaattttaatctacgtgatctagctaatgttttctatcagagaattacaactagttgatctcaagtacaaaactatactgaatatgcaaatctttacatccaaaaactgaatttaaataaggctctcaaatttgaaaaaaaagaagatagcaatgactacatattgatcaacctgccaatacaatgataaaacatcagtgtattctaagcaacactaaacagtgatactacatgagcaaaaagattgaagtttgaaccacacatgatcaaggaaatgaaaataggcataccgccatgatctacaaatcagcaaaggagcaatcactatccagaatcccacaataaatccaattgccgcactgacaaacaaccaattcactccatgcccatcacttccttcataactatgagttttcccattggagctgcagtttatggaaagtggtggaccacatagattgttgccaataaagctggaggcatcaaaggtttgcaattgtgttcctgttggaatttttcccttcaaatgattataagacaagtctagcatgcttaaaaagctcaaatttgaaatggttggagggatttcaccagaaagttgattcctagaaaaatcaatggactgtaatgatcccatattaccaatgccttgtggaatatgaccaatcacttggttgtgggataagttcaaaaagttcaatccatttagacgtgtgatttctctaggtatttctcctaataatttgttacttgacagatcaatgcttgttaccaaacccagaatgtttcggtactcatcttctcttcctttcagccatagtatcacaccaactatactatatccggaagagtaatgtctactattttgtgctacagaatagatacgaggatctgaactttggttcattagtttcatggcactcaagttaattactgaaacaacttggtatattaccagacagattgctttgtgcaaggtctaaaacctgaagatgactcatctgacatatttcatttggaatgtgaccgacaaaactgtttgatcgaaggtggaggattttcatgtttaagagttttctccaacccatgttggaatacttcctgaaagattattttccccaaggtccaaggatatcaattggttattcttcttcaaacaggtaggaaatattcctgagagtgtgttgttaccaatttgtaaagactgcagctcagacaaggaacccatggatgagggtaagttcccaacaaaatggttgctttgtaaattcacttccactagaaatggccaattaattcaacaatcaggtatttctcctgacagattatttgatgcaagattgagaatttctaattgcattggcttgtcctgattgttacataaaaaatcttgcatggattcagagaatgaattggttgaaaggtctaacccatacacatcatttgaaagatagggtaatttaccacataagtgatttgtgcttagatcaacagttgggatagatattggattttttaatgtagtcacaagctcaccatggatatgattatgagagtggtttaaatacaaaacctgagattgtgcttcccacatctgtgtaggaatagaatcaataatccctgtgttagacatgcctaaatatttaagttttttttgtgactgaatccacgatggaaagctgggacctaactgccatgatcccacatccaaataggtaagctgaaaactaggaagccaattggaaccaacttttaaagtgaaattgttccctgatgcatgaaactccttcaagcttgtaagatttgcaagatcatcttccttgacaactccttgaaaattattgccatcaatacgcagagatgacaatttagagagtgatccaatactttcaaatggatttccactgaatttattaatagacagattgagatatcttaatgatgaaagttttccaaatgatcttggaagagcaccaccaattaagttgttggaaaaatctagcatgtcaatatttttaaaagccccaatttgatctatcagattgcctgaaagttgtgaactccgaactgcaagtgttgtgattccctaggaaatacaaggagcaagaatttctaaaagttcattaacctgttggttgagtttgagatatgataaacctatctcccttaagttgcagagattagccaaagaagttggaatggttccttcaagtagattatatgacaaatcaagttcaacaagagaagtcaaatttcccagggcatcagaaatagtcccatgtaagttgttgtccattaggttcaggaacttgagacgatgaagaccgtataagcaatcaggtatagaagatgagaatgaattgaaagacaagtcaagattttgaagaagtgtgaggtttagaataccaccaggaatcggaccttggatttcattaccccataattgaagagaaacaagtttattcaatttgagtatccacttggggacaaaagaaatggcaggggaataactagtacgggaaagatcgagaatttgcagagatgagaagttgagcaaggattgttcattatagtgagggagtgtgcagtctgacaaatataggtgggtcaaagaaggaagagattggagagtgtgtagccaatgaaatgctttggataggtttgcatttcttaaacttcataagtgtctcacgctcacttgggatgcacacactctctctgcaaggtaacctaaagaccaaagctccacaaacacaacaatataaataatggaggaggaattcatgttcatgcaacgcatatatgaaacaacttaattgtataagtgcttcttgcttctgaatattaaacttacttctttctattatttatactgccgcaactgcctttctttcttcattcttatttcttttttaatttacaaaatgatatttttcttatatatgaaaaagggctagttttcatcgtcataatttgaaataggttgttgtgtcgtctattaatttctaattgtatttgaatctggaaattgttctctttttaatataaaaattaattagtgagatacaaagaagtgtgaaatataatgcttgtttaacttggtctaccataattacagagatcataattttttcttttataagtcttgcttcaaacttctccatgtatcgtagctattttattgttagactaataatgcgtatatagaatataccatagaagggtttgcatttaaaattttattccactaatggtggtggttgcagaatgcacaaatatgtagaggtatatatgtctacaacgagccatttaggattaaaactgtctaatcacaccaccattattttgcactagtttattttattttggtttaactacccttttagtcttgatagttgtgataatttttctttttagtccctataattttaaacatttattttggttcctatatttataatttttttaccttttggtcctcagcagaaagtttcaactcacacatatacatgaacaaaattaataaaaatagggaagcaagctcaggcacaactgaactgcaatggaggtatgggactaagccactacacattccattattcttgagtctgccaccgacccctgcaagcttagcatttgccaattgccatgatgtaatctccttcttcattgtctctcatcaagttggagtggtatcacagcattgaactaagttgatcgttctaatggtagtttgtgccttcatggttgggatgatgttgcaggttccggtttgttgttgagggaaaagatgatcagccacgtctcgtgtgtgcataagagagtgtctttgccctctccataaccttagtttcaacaattgacgttagtcgaaacttgatggtgagaatcaaaagagtaaaaaaaaaaatgtgtttaattcataatatatattcgaccattgacaaattttttcttcaaagaaaatctttaatatttaaaaaattttattttaaatctccatcgttaaataatgacgtaccttcaatatttatttgaaacttgtcttccaccccgtctccctcaagctctccacattcacacacatatgaacactaagctctagacaaaaataaataaataatcacgagaaataatatataactctttagtggaataaataaataaacactaagctctccacattcacacacatgaaatgatccagactaagttaacaaactaaatggtcttcttccgtgagttcacaatgaaaccacagaatttattttcatccactagtttccttcccaaatgttttctaaaacataacacactacagaaccttctaataatttttttttttaaaaaaaaaaccaacattttacatgtagcaccacaacttaacaatttctagctacaaccctgctctgtatactcattctaaacttgttccatagactataatatcatctatctccactcattcattcatcaagattgaaaaatggattcaaatgcttgtctaccacacttgctagtgtttgcaataacattggtattggttagtcatgcaatgggagattcagctcaagacaaacagagatgtgcagaatccctaacaggtgttacaacgtgtctgccatatttgggtggtgacacgaaatcacccacagcagattgttgcagtggtctaacacaagccatgaagaccaacaagaagtgtgtctgcgttattctcaaagacagggatgatcctgatcttggcttaaagattaacatgacaattgctgctggtctcccttctctttgcaaaacacctgataatttctcacagtgttctggtatgttcaatttcaaattaagtcttccttttttcttaaagaactctacactacagtgttatgtttccatttcctatgcaatgaatgatctataagtcttgttagtggtggccatataaaaacttatgtttttatctttcattgtttgatgataacctgtttttaataggaaaaaaaaagtctttatttctattttcaaaaactatttttagttttcaagatacaactaaacaagttcttcagactgtttggtggagaatgatgtgagacacagaatgtggaattgagagggaacttgaacaagattaaaacagaagaagcagagaaaacgttttcccgatgtttttgttttttttggattttagaacacttattttggatacgattctccaaacttatatattttggaagagaaattgattactaagtagtctaaaattattttataaaacagtttcttaactgagaatactcagaccctaaatcttccaattttagtatatttctaaaaaaaaatcagaatatttgtggtctaagttttatcattatcaagcctttcattttccttaaagaacaaaagagtgtcacattccatttactatgtaatgaatggtcaacaagtcatgtacttcaaagttttctacttttctcattcgtaactggacaataacacattttaaaggggaaaacaagggcatctaaatctgccaattttacgttgtttgtgtatctgttatctctgagttttcaactccgaagttaaaaatatttgaggtttgattttttctcaagaaattattgttttaaattatttgagcagcacttctgcacttggatcctaaatcacctgaagctcaagcttttaatcaaattgatcagaaatccaatggtggttctatccgtccttcgcccactccttctggtagtgatcctttcaacaaaatatttcatttttggaatttatttttgacattgacttttgagtttcaatggtgtagtactaaattttgcatttatttttaatgtgttcttttgtgcattcagttgaaggaagttcccagaatggtagaaagcaggggacagatgaaacggccacagctaagaatagtgcatcttatatcgggaagagattcttagaaagtttggttgcagttgcagggcttctaatttggctttcatgagcttaactcaaatattacctatatattaccattttcatatcacgttgaaatgtaaaccattgatgagttgatagtgtaaaaaatatttacactcttgagtgtattaaatctctgacagactcacaaaagacattattgcaaaaccttattggagatttatttttgtgagcactttgcctttaatctcatacaactatatgcttgttacacaaatcttattgtacgttcagtcctaaaagtcttttatctctaataagtaataacgacttgttgtaatagaaattaaaatcttattatttttttttaattacacttgaggatgattttgttatcccacttttcaattgctcggttcgttcccatattttcaaattttacaaatttgattcattagttaacttgatatccaatctttgatggagatgtttatgaggctatatgtgaaaatagagtgttggcatggatctcaacttttaattcctcaattttggttgccatatttttaaaattatgcgattttggagcatgagtgttgtttttcaaatataccaatactactcagggattatgcatgggaatcttcttacatgtatactactatgaattatgttgtctgcttaaagttgtagcagaaaaatacaggtaattttgaaggaggcgaaatgcatttcagaagagaataattgagataatgtggagcatttaccttgtagcatttccattttgaaaaataataagtttctaacattacaaaattaacaaactgatttttttttctcgtaaagcctaaaactcataatccgtcaagcatgatatggtttctttagccaagtacaagataatctagattctacttgtatcctcccaagatattctaagaatgaatgaattaagttgaatatggaaaaaaaaaatattcattaagatgttatggtttgattatcccagtaacttttctcccatgattcaacttgttgaattgagctttcctttctctgtgatgttgcatacaaagttggagggtcaaaaggggcaggcatggtgcaagggtcggtatttgcaggaaccttgaccaatgattccatcataaatttctttactgatccttctgctccacaaaccattgactccacacatagttctgtagcattaacacttatggagggtttgtatctgaagagtttagcatatgaattcaggagatgaaacatgtagtcgtacacgtagtccatctttacctcttcttgaatgaaatcactcgccaccttgccaatttgatgtgcctgataaatttcacaaatagaaatgaaatggaacaagttaaacattgagaaagtgttgtttaatttatttatttcctccaaaaagttttgcattagtaggtaattcttgtttattattcgtataagctcacattttagtatatagtatatctgcatatggattgtgcaataatgtaaaggatgaatcattgatttgcatataactattgaccctgattaatattaagtgattcaccattaaatcaaatattcggaggtgaattcttttaggattaattaacttggtaagaattatatctagccttagtgaagaagcaaaacttcaagattaccctttgtttgtgattattgccccaatccacagcaaacttaatggatctgcacttctcatcgtcctttatgggccaatggtggtgtactggaatcagtcctcttgtgaaaaaatcatagtatttaggttttacaagtagagtggtagagtcacatgacagaatgtatttttgactgactgaccaagcagaaccttcaatgtacaccttatatctgcacgatcatgattgaattgaaacatttatttattgataaactgaacttatatatccaataacaaaaatatattattacatataattacaactgaagcatgaatggacagttttaatgttatacctataagtgcattgacttggcaagtctgatttgttgaacccctcttgtaattctcgaaaccaatcctgaaacaaaattttcatttgtcaagaaggaagctatatatgtggctttattgtgagcataaggctctctgttcagccatggtatcctcgtagtgccttctttcaattctcccaacaaaatatgccatggctttatattaatctctgccctgtgcaccacacatacaatactttttacttatataaaaattaaggtcgcgttaggggtgattgtcaattttcaattttccattttaaaatataatttcgaaatacaaacatgttcaacaaaaattgcactaagttgattttttacatctttctgaaatggtttttatcacatataacaaaaaataaaattttgtttaatttattgattattgtttatgttttaacctttactgtttttttataatatttttttaattatttttattatgtttaattctttttaatattacatgattttatattggattgtgataagattaaatatttaaattattttatctattaaataattttttaaaatctaaaaattaaaataaactgaaactaaaaactccaaacataaactgagtttaatttttaatgattttgaaactgaacacaaaaaactacttctagaattgtgtcctaaacaatgtaataaaaatataattctattgtatatttgtataataaaatcatatttatgtaaaaagaatacttttagaattttctaattttctacccacatgggtaatgtaaatagcaatataaaatcctacttagcccactacgataaacaaattttgaaaattttcactcataaatggactcctttagatgtccacacataggtccttctagacttgaatgacaaattgaaaggtaccaaaaaaaaaggttttgatataataatcacatgctaaaaggttaatttgtgtattgtgaattattgattttgtttattatatatcctttttcttttttttccaaattttaattatttggcagttttacactgatgacaaaatatttgtaataccttaacaacgttttatcacatgatttttacgtcataacccaagtgaaaaatcatatgattatcgcatcatcattatttaacagtggttttttatttatgaaagtgactgagcaatgacaaacagaattatagattaagaccgcccaaaagataattgagagactaataatcactttcgtagaaggatgaagaactaaaagttgataaaattcaaattcttaaccattcatttaaagagtcagaatctatcacactattcagaccaatcagtactaaagaacaatttataaatattaaccaaaaataatgaaagctggctacactggttttcaatgggaagagtctgagaaactacttagtattgagggaatggagcaatggcaggttcatctgagagatctacatcatcaaaaggttgtggagaaattgaagagagtgcacaggtcctgcagccaccatacctgagcttttgatctcacccatttgtcgaccagcatttgcaccttctgctacacagcacacaatttgggaagaaacatgaaagacaaaacttataatttgttagacaatttattatcgtatatcattttgtgtgttcagttctgaaaatgttttttagatgcgtattcataaaagataaaaataaatagaaaacaaaagtaactacatacaatattagatcaatttgtttttgttacaatattagatcaatttaattaagacagaaccgtatgtcaaatatataattcatgcattcaatgataaaaattagaattatttttagttaattagcaatgtaaaaattgatgctgtgttatagttttttatttttaaatcacaaggtattttttattaaagataatctacttgttcaatagaaatagaattattatagatgatacatttttatatataaatatttaatgtaattatatatttaattgatcaatacactttgtgttttatggtgtgatagttagacaagatcatatcgatgcaagtgaacagtgtgagctaggtttgtatgatggctatgataatgaggaattaagtttggtcactagctactactactagtcaatggagaacctgttgctccaaactacctgcgatactttatgtttgaaagaaaacaaaaagattgctcctatactgggtcctcatacagaaactatctcatgctgaaaattacgtatgatgtttttatatcataacacaacattatttttcatgatcaagggaaaaaaaaataaaaatattggatgcccccatagtgtgcaactacagaccttcagtttgcaagactgaagtctctacgtaccattgagctacaggggcaagaacattttgaatcaaaaattgatttttctattggttcttcctttcctcccttatactctcctcttttcataaaaaagatgtgtttctaatatataatatttataatatatataatataaaaatgttgtctttagtattgatttagattaaagtattccatttacaataagaaaaaaaatgtaccaaaaactaagtatttcataaatttatcctgacatttgatatacaagtttttatattacacattttcttgttagatgaatattgaatcggatatcgggagttttttttagatatatttttgcttgaaacatgatctaatactaaatataaatatttcttcaagtaaaaattcaaatcttaagtcatcaccttataaataactaacccctactagacttgatacctataaaatactaaaacacttgtgtgaacaagatccaaaagtagtaaaaatgacgggagaaaatattgtatgcatagtgatgaagccggattatgtattaagattgagaaactgtgggaattatggaagtggggttagattcagacaagttttttgagctttagtctactctataagatgatccagaatgaaattcaccagtttgaactacaaaatccgtgtccaagttctaaggaagattctaaagtgccctttcgacatagacccgaagcctaaaatacaatttaaatatgcattaatgaactagtttaatacataaatatatacaaaaatacatgtttaattaaattatatttatagccattttattttacaaggtgcaaactctttaattctgacataaataatattcttttaaccacgcgaaatgaatgagttagtcaaaatatgcataaacataaattgatttagaaaccatctgcacatgggtcacagtgattatcaaaacaaaatttctcccaaccccttcctccctcttccctgttgctccaaactatctgcgatactttaagacatctaaaactagatcactaagttttatgatgtgttacggtttgctttaaaatatggtacaaggtttatcagagaccggcttataagtaaaaattaaatttgtcataaagggagtaaaatggaaaataattaatttcttaattagaattaaattagaataacctgtgcagatcttataatatttgttcactaattcgcccaccacataatgttttaatttttccaactttgtataatctaaaaagtataaaaatgaagattacgactttcagcctccagttccttttaatggaagaagtgagtaaatgttgatgggatatcggtagctgaccttgtcaaagaatgcttgggccatgatcattcaaaaatacccttaattgatctttagctcaacattttgtataatacgttaattaattttttaaatttatgattactatcaaatatttaattcttaaaattgttaaacaaaagacattttgtttagttgttgatatttttataaggttaaaatatatttttaatcttataaatattaaaatagtgaaaagttatctggataaaattttaatatatttttggttctcataaaattaaaatatattattttttttcttgaagtaagatttaaacattccaaattatttattacactttttattatatgtataattaatgtaaaaataatatatttacatcgatatatatatatatatatatataatcaatataaaaactcataatttaaatttatttgtatctacattcagaccaaataataataatgtattttaattttgtaaagataaaaaatttattaaatttttacaaaaatgaattccaaaaatttatatatttatcaaataaaaaattagccaagatacttcctgcgattttgttatcacttttctgtttcaggcttcatattccgttagttttggttgtaattaatactgatcctggaacacttgaatattaattcattttgactcttcaaaaaaattgttttataaagataaattctttagtattttttgtgttaatttttaagtaaagttaacatttcaatttgataattaattttaaaagctgacatttattattatataaagtaaaacttgaaaaagcaaaacgaataatacttaaaaagttacacctattatttgccctttttatagttagggtaatttagaatattactccaacaattttgttggttctcaagcatcattggttatctatggatatctcatcaaagttcttggcctggccggcttggagagtcaagtcttgtatgcagccacgagtcacgactttaattaacacgaaagaactaattattcacttcaatggttagtgactaaaattaaatataagtttttttcctattaaaccacgttttcttgaaccactagtcccccatttttggaaacaagaatgtgatacacagaattgaacaactagttgatcttaactacaaatatgctcaatatgcaaatatgtacatcccaaaacagaatttaaataagactctcaaatttgaaaaaaaaaaaaaaaagaagatagcaataactacaatgcaaattgaacaacctggcaatacaatgatacaacatcggttgtaagcaacactaaacagtgatactatatgaggaaaaagattgaagtttgaaccacacatgatcaaggaaatgaaaatagacatgccgccatgatctacaaatcagcaaaggagcaatcactatccaaagtcccacaacaaatccaattgtcgcactaacaaaaaactaattcactccatgcccatgacttccttcataactatgagttttcccattggagctgcagtttatgggcagtggtggaccacatagattgttgccaataaagctggaggcatcaaaggtttgcaattgtgttcctgttggaatttttcccttcaaatgattataagacacgtctagcatgctcaaaaagctcaaattagaaatggttggagggatgtcaccagaaatttgattcctcgaaaaatcaatggtttgtaacgatcccatattaccaataccttctggaataggaccaatcaattggttgtgggacaagttcaaaaagttcaatccatttagatctgtgatttctctaggaatttctcctaataatttgttacttgacagatcaatacttgttaccaaacccagaatgtttccatactcatctcctcttccttttagccaaagtagcacactaactatacctgataccgaagagtattctgtattatttggtgcatgagaatagatttggggatatgtactccggttcactagtgtcatggcactcaagttactgaaacagctgggtatattgccagacaaactattttttgcaaggtctaaaacctgaagaagactcatctgacatatttcatttggaatgtgaccggaaaaactgtttgatcgaaggcagaggattttcatatttgagagcttttctccaacccatgttggaatacatcctgaaagattattttctccaagatccaaggatatcaattggctagtcttcttcaaactggtaggaaatattcccgaaagcaagttgttacgaatttctaatgactgcagctcagccaaggaacccatggatggggggaagttcccaacaaaatggttgctttgtaaattcacttccactagaaatggccaattaatccaacaatcaggtatttctcctgacagattatttgatgcaagattgagaaattctaattgcattggcttgtcctgattgttacataaaaaatcttgcatggattcagagaatgaattggttgaaaggtctaagtcatacacatcatttgaaagatagggtaatttaccacataagtgatttgtgcttagatcaacagtttggatagatattggattttttattgtagtcaccagctcaccatggatatgattatgagagaggtttaaatacaaaacctgagaatgtgcttcccagaaccaagtgggaatagaatctaaaatccccgtgttagacagtccaacatattgaagtttgttttgtgactgaatccacgatggaaagttgggacctatctgccatgatgtcacatccaaatagataagttgaaaattaggaatccaatgaggaccgacttttaaagtgaaattgttccctgatgcatcaaacgccttcaaacttgtaagatttgcaagaccatcttcgttgacaactccttgaaaattattgtcattaataaaaagcgatgacaatttagagagtgatccaagactttcaaatggatttccactgaatttattaatagagagatcgagatatgttaaatctatctcccttgagttgcggagatttcccaaaaaagtcggaattgttccttcaagttgattatatgacaaatcaagtccaacaagagaagtcatatttcccaaagaagttggaatggttccttcaagttgattatgtgacaaatcaagttcgacaagagaagtcaaatttcctagggcatcagaaatagtcccatgcaagttgttgtaacttaggaccagatacttgagacgatgaagaccgtataagcaattaggtatagaagatgaaaatgaattgaaagacaagtcaagattttgaagaagtgagaggtttcgaataccacaaggaatcggaccttggatttcataattaccagataattcaagagaaacaagtttctccaatttgaatatccacttggggacaaaagaaatggcaggggaataatgagtatcggaaagatggagagtttgcagagatgagaagttgagcaaggatggttcattatagtgagggagtgtgcagtgtgacaaatataggtgggtcaaagaaggaagagattggagagtgtgtagccaatgaaatgctttggataggtttgcattactcaaatcaagatattcaagcttccacatacttgatacccattctacattttcagctaacagaggttcgacatcagaataacctccaaggcaaagatagagcaaattggagagattcccaatctgagatggaatcttcccatggaatcgagtataagagaggtcgaggtgagtcaagatattgaagggattgccataccttttccaagtaaataattgccgctcaagtcaagatattcaagcttagagagattcccgatctgagagggtactgttccgttggcaacatatctcatgtcaagatacaccaaatttgagagattcccaatctgaggaggaatcttcccacggaatccagtatgagagaggttgaggtgagtcaaggaagtcattgtcccaaggaaagaaggaattgacataccttctccaagaaatctattgccgctcaagtccaagtaattcaaatgctttaaatcagccaaacaaggacttatctctccaccaaagctccatctctggtaagcttcccaatcgaagtgatagttgccatcatagaaagcagaaggtgaagtgttgaggtgaagctgaagaagatgggaagtgacgttgtggcagaggactccataccagtggcaacagttggtatgattatgattccaagaccaaagcctattggaaggatctatgagattattcttaaacttcaaaagtgtctcacgctcacttgggatgcacacactctctctgcatggtaagctcaacaaccaaagctggacaaagacaagaatataaatggaggaggaattcatgatcacacaaggatatatagaaaacaagtgtggcaaataaatcatcaaacttctatttttggttctgcatataaatcatcaaacttctattttttatactgctgccctgcctgtttttttcttcactttcattattttttaccttttttattattgtgccaaatactaaaatattcttccattctttttttacgctggcctctttaaattatcgatttaattatccaattctcccgaattaattcttagaatacgaatttttttgtatttactgtatctatctccctttttaaaattcctatatacactaaattcttttaggtacagtttttttttacaaaaataaataagaattattttattttaatttactctataatactgcttaagtgaaaatttggtgtcattaaacttcaaattttaactattatttaatcaatctttccgttaaacttttgttacgtacagaagtccagcatttttttaagaaaaacatcaagtcttttatttcatcaaatttaatattaaattatcaaattttcaatattcaaactaaaaataatgtaaaagaaaattgtcttctaaatcatagcttacaccatcaagtcaatctcaaggttttccattttttcatcttgaacctttggacactccacaaagtccagccatgatgttaaggtctgacttcttcaacttgaaccataggtcactgcattaccttcatatcaagttccctgtcattgacaacaaatgttgcgagttaagtcaagcaaggaaaaaaaatattattgatgaataaatcaattataggaaaagagtttactttaaagactattttggttaaaaaatctataaaaaaaattatttcattccaagctagctatttaattttgatcaatttttcaattcacaaaataatattcttcttatatgtgaaaaagaccaattaatcttcattgtcattaatgattgttgtgttgtctatttctaattgtttttttaatcataatattattttctttttattaaaaattaattagtgagatacaaagaagtttaacttgatctatcataattattgagatcatagtttttccttttataagtcttggtccaaatttctccatgtattgtaaatcatatttaacttaaaaagtaaattagaagatctacaaagaagtgtgacatgttttttaaattataaaattatggtcctagctatttattgttagaccacaagttttcatatattaaagtttttgtctaaatttcatttatggtgatagtttaagaatagtgatagaagacaaaaataaatattcaatttattgaaatatcatactcaattaattgatgaatacatcaattataggaaaatggtgtactttaaagactatttctattaaaaaatctataaaaaaattatttccttccaatctaattatttaattttaatcaatttttcagttcacaaaataatattctcttatatatgaaaaaaagactagatttaattatcatcaattggaaaagttattgtgtcatgtatttataattgtattctaacttgaatattattttatttatcatataaaaattaattagttatataaaagaagtaaaaagaatattaacttttttctcaaaaaaaaatcagtatcatattttatatgttttacaagttatcaacttaaataagaggagaaacataattttaatttccattttactttttaaataattgcaagtgccaaatttaaataatcatgagaatactcacgttcaacataatattctcaaaaaaaaatccatacgataacttaaaccatctataaagaaatataatttattcttgtaccaaatactaaaacaagaaacatttttttattttagtttaccgtatagaattgtttaaatcaatgaaatttttattttaagaaaatattaatgatttttttaaaactttaagtaatttacatcaaagataattaaatttggcttaattagtcttcaaattttaactattctttaaatcaatcctttcgttaaaccctgtacgtgttaagtaaacaacaaaaagtcttgtcttataaaattcaaacattctattacatgcggtttgaacccatgattaattttaaactatcaaattttaattattcaaaataaaagaaatgaaaacaaaattgtctcctagacaaaccactggccactccaccaaatccatatcaaggtccccacttttccaacttgaaccatagactactccatcaagtctatgtcaaggtcctccacatgcaatgttatatgatgtgatttttttcccattcaatgttatatttagctacacatcaaaattaattttatacaaaaaaatttgcatataggttgtttttagtgaatcaaattcttttttaattcaaatagggacattagttttcgtatccgttaagaataattgatacctaatttaaataattgtattaaattctaattataaaaaaaattccgtattcattatcataaaaatatttaacaatttaatcattaatttcgtattataattgatacttgacaactaatatttattgcacttaatttcatttgataataactgatatttcttcaatcgcgtatcatttgtggcaaaacgaacatccaatatcattggagaacaatgttgatgtaacgattaattcattgagaatcacatgaatgcattaaattcaggatattaaatttacaaataattttatgtttttcaattatattttaacaataattaagaaataaatctaaatcgttctacatttacatttgtttataggtatttgggatattggagatgctatatgcgaatctaaattttgcttaacacaaaaatgtggtatgcaaggaaaaatcacattgaaatatttttatctgccactccaaattttaaaagatttgtttcaaaataaggatatgaagaacaaattattgattttagagaacatttcctccatgatgttttcctttcctttaggtgaaaaacaaaaagacatttccaaaaataatgaaagtgcatcttatataatgttgtttatatagagaagtctttgaaaatataagtcaagtactattacaacaaactattctgtatcatatatctcttatatattttcatataaaacatttattaattttttatttatttcttagtaacatgtacatgaaagtcaaaccaaaccgaatcgaggatttatgtggcatttaacttttatcactttttgccctaaaagatcacactctaatcatgtaccaaaattttgtggcgtacaagaaaactcttctatttgggaacagtcgatctttaattgaacctcttttggcaaatggaactagctttggtgttttgaaaatctcactcacatatttccaaatgttacaaaagaatttgattcagtggtttttacgaattccttgctagccttttttaccaagtcagggaatttgcattgttgtgcatgatggctgccacaaggacccttgtaccaacccattagtgcaaggggttttttcttatgagaattgagaaaaaaattatatatgtgttttattaagggaattctattatttttaattttgaacttgtaatgttttttgtttccctcacagaacaagtgatgaaactcttgatcgacgccatacgtacgcctactttgatgctcttttttcacaccacttttatcttaatggtatctcaagttgacaatcataaattaaaatagctaactatagttgattagtagagacaaacagctcaaagataaagatctttaagccatcatttttttttccttttcttttctatgaactgtcatttcttatctctacatggaatgtctagaagttgaaaattatttgagctttctttacctactgctttccattttggcgaactgcttttctttctcataatgaactttccacttccaatgatggttgaacattaataattcttcatctattttgtctaaaaatttcaactcactttttgtgagtggtgtgaatgtcatgcagacaaatgatatccaagctccactatttcctttcattgcaagttgtaagcagaatgtagaatgtacgtataataaaataatgagaatggcaactgctagtactacttaattagaacaaaagtatcaaaattaaaacgaaaataactttgatgctgttaatatatgagtttaattttgatagatagtgtaaaattttaaattgttaattaattagtaatcaccaaatgatttgtaaaacaattactaaaaaagttataggaaatatatataattaattaattgcaaatgaaagtgtatttaaattaaattcttaattaacatatccttattgtgatattttgtatattttttatttaattgagacagtggaatgagatcgcactataattttcatcacgggtgtggttgtctaatataatagggatggttggtgaggaattttggaatgttagttggttttagactatatatcctcttgttcagttttcacattctcattagagttaagttgcttttggggaagaactaatgtcttgaaattccctcttcaccagaagcagttttattgtgtctttatcgaagtcatcttctccagagacttgcctttaactttgaagataggaaatagatcagtcaaacattgtttcagtttatttggatttttttttaaggacatgtgattttcaaagacttgttacaactcacaacctttggaatttctctatgcctggttaacccacaatttcggcgcctgttgcggttaggaacataggctagcaaaaacactaatcgtttcaagagaaatgttaacacacttttctaatatattattttttattttaaaatttattaaaataaaaaaattcagctgatctcatatttaatttagcaaatttttctcatatattaagtcttaggtttttaaaattataaagctaaaactaaaatgttttactaaatgtattttaaagtaaattttatacacaaaaatattatgattttataaaaattgtttggtcaagggagacatattgagccctcctaactataagctaccctgagggtttctatctttttttttcccacttaatttttgactttggcagcaagggttaaacctaccacatctacatgactatgtcttactttccaataagttacacctaaatagctaacatattcctcttgctcacgcacactatctttcgtaaacttttcacgatcatctttatattatcaaattcatttaattaaatatacaattatcttaatattataagcaactctctgtataatcatgtagtgtttctaaattgaatgagcctaaatcacacactcctgaaaaaaggataaaaacatatttaatttcatttagtgtttaatagtgttttggtctattttttttgtttttttatagttatttcttttcaaatttgatgacaacattgtcattgggtccttctacccttcacatcagcaaattggacactaaagagactcggtcagaaacaaataactactaggggtacaataacatgagaggatttaacacttttggagtaggaaaatgtactttaagaaaagaaccacgagaaatagtatataactctttagtggacaattggtgttgtacaaaattgaaatgatccagactaagtcaacaaactggtcttcttcattgaactcacagtgaaaccacagaatttattttcatctactagtttccttcccaattcccatgttttctaaaacataacacactacagaaccttctaataaattaaaacaaaaaaaccaatattttacatgtagcaccacaacctaacaatttctacctacaactttttctatagactataatataatctatctccactcattcattcatcaagattgagaaatggattcaaatgtttgtctaccacacttgctagtgttagcaataacattggtattggttagtcacgcaatgggagattcagctcaagacaaacagagatgtgcagaatccctgacaggtgttgcaacgtgtctgccatattctcaaagattgttgcagtggtctcacacaagccatgaagaccaacaagaagtgtgtctgccttattctcaaagacagggatgatcctgatcttggcttgaagactaacatgacaattgctgttggtctcccttctctttgcaaaacacctgataatctctcacagtgttctggtacgttcaatttctaattaagccttcctttttcttaaagaacactacactacagtgttatgtttccattttctatgcaatgaatgatctatcagtcttgttagttgtcatataacaacttatgtttttacattcagttgaaggaagttcccagaaggaacagatgaaacggcctcagctaagaatagtgaatcttatatcgggaagagattcttagaaagtttggttgcagttgcagggcttctaatttggctttcatgagcttaactcaaatactacctatatattaccattttcatatcacgttgaaatgtaaaccattgattagttgatactgtaaaaaatatttacactcttgagtgtactaaatctctgacagactcacaatagatattattgcaaaacctttttggagatttattttttgtttttaatactaacctagagtctacagatcaaagttaattaattgctgaaaattatgttcattctcattcttggcgctgttagtccagtgtgaaaacggaaaaattcagtttcatgttatatatggctctgtatatgaaaaggaaattaaagaaaaagtagaatttgattatggctaatttcacccattatatttattacaagaaaacctttatttaaaaattatttttttgtacttttagcttggtcgtaaacattaacattacatcacgcacaaacataaaaggcaaaccaaattattttacatccctaaattttatgaggaaggattctataaatattaacaatacatctcacacacacaaagacaacaaaaattatatcactaaattgaggtggggatagttttgaaaaaaaaatagttggtgtggttgtgtaggtgtgtttttatgtttttcaattcaggatattaaatttacaaataattttatgtttttcaattagattttaacaataattaagaaataaatctaaatcattctacatttgtttataggtactcggcgaattggagatgctaaaacatttattaatttttttatttatttcttagtaacatgtacatgaaagtcaatccaaaccgaatcgaggatttatgtggcatttaacttttatcactttctgccctcaaagatcacactctaatcatgtaccaacattttgtggtgtacaagaaaactcttctatttgagaacagacgatttttatttgaacctcttttggtaaatggaactagctttggattaccatgtgacaaaaaactactttccaaactttggattaaccaaatctgaaaagcgtttcgtgtaatattggctacgcatgactaattaacttctgaaacggtcagctacttcataaccttttgatgtcattctccccaacaaaaaacaattgcaacttgttacctagcaacagcttgaattgcttgctttctcacgcacttagtgaccctagatgcttgtgaaataaattgttataaccttcactgtttttcatcaatattaccaaaatttccttaaagtgttcaatatttcgtaatcttcataattaattcaaaattctcaaaagattagtatatgaccttttttcttgtttgtactaggagaggaataaatgacaaaaattcagaaatttgtggattgcaatttgctcaaatgatgtgtctattagttctttgaaatttgtattggtcatatttatttttaccttttaatagatatattgtgctgtcatcccaagagaaggatcaaacattgatgatgcagaggtgctaagatattgcaagaagaatcttgcatctttcaaagtccctgaaaaggtcttcattactgattctttgcacaagactgccaccggaaagattttgcgtcgtcttgtggcagaacacattgtctctcaaatttgagcaactgatcaagtcctacttttgaagcctccatacctggccatacatagttggagtccacacaccataaatttcaacaataatttggcaacttggcatttaagaggagggtaattctgcaaatggtctttcattcaggatacaatagattgtagttttcaatgattcacgtgaaatgttcacaatgtaatgttttcaatgttttataggtcttaaataccaatagcagacaagatcatgcttatgcttttttgctatcgtgctcctgttccttgccactggtcttgatgaagccaagcattgtctctttgccttttaagttgtacatagttgcaaaacgggtacatgtgaaagaatcatgcttattaaaggtaaggttgattttaaagtgggcatgcaagaatgcattcattatctcaagtaaataaattcaagcgaatatgtgatttggattagagaatagtattatccagtgcacactaaattggagagattcccaacatgtggtttcaaaactaaaagaacttaccaactatttgaattttaatccacgtgatctagctaatgttttctatcagagaattacaactagttgatcttaagtacaaaactatactaaatatgcaaatctttacatctaaaaacagaatttaaataaggctctcaaatttgaagaaaaaaacgaagatagcaatgactaaaaattgatcaatctgccaatacaatgataaaacatcggtttattctaagcaacactaaaaagtgatactacatgagcaaaaagattgaaattattgaccatgcagtatgaatgtacagcattatttatttaatttttctaatacaattttattttatattaatacactatatcattatgacatcaacccccaacatgagtggcccagtggacaagcccatcaatctaacatgtcggttgatagcacttgcataaacttttgttccttgcatcatctcatgtgtctccattctccattctctgcttccactaacgattaaaccttattgattagggttcaatgatttttcaatgaataaaattaattttaaattctgattctaacagctcacgtatagtctgttgaatcaaatggaatagaatcttgatatcataaagaaaattaaaatttgattctttgtgtaaaataaagaaatctaattaattatgcttgttatgttactatatatatcatttttccggtgtggagtaacatcaaaatcaaagtaacatagttacttgcatgttactctaaccataattctagataagtcgaatatggtttcatgttttgtaaaacaatttagatcccctttatcaaagtgtatctgtcttttacacaagttttttcactttattttatttcccccagaatcaattgttgtgttattcatactattaaattagtctgataactaccatgtcgatcattgttagttttgtttccaccattgttcggagtacgtatatactattactttatgattaaacgtgttacttaaattgcagataaaaactctttataatgaagtacaattgtttataactacaacaattatattgagtcaatttaacactcatcaaaggcagaaaagctttactttaagattagacagaggctcataccaatcatggcggtggttataattacacacatcagcaactgtaaaagatcttgcacagccacagaaaaaaaaaatgcttgatgcacatctgataaactcactcaaggtctatgtattaatagtgtaaaagagagactgaatattaaatgataaaaatataaaataattgttttgtattggcagagtacacatatatatgcccaaatgtagattcaaagttcaaacattttgggactagatcatccctcctagtcatagccatctgaattggatcgaccccaccccaaggtttgtgttgcatcacttgcatgcattcacccaccactgttgttgttatagttttctcgtgatttttgtattggaaaatactatggacaaatataattgatacagtcataattaattattgtcatgttgcaattacaaagactcctcaaagaaaatgtttagtaaatcatgatcaagtagaaattgcaatggcaaactgttttttaaaatcttattagtcagttgtataaacccaaatttagttatatccaggtatgtaatatttgccattttagtgctctgtttggaaatttgcgtgtcgaattgttttttttatacgtacctacacaacactctttagcaaataccactgttcatggaggaatctttcctgaaaggagtatagaaccagaaacaatatgcgtggtggtatctatcatctgtaaaagagaaaaagtgggatacgtacaatagtaggactgtgacactaggggtagaaatgagccgagtaacttgtcgagggcctttggctcggcctatgtgaggctcggctcggcttatttactataaaggttaagctcaagcttttgaaaaagtctttttagattaaaaggccaagcccaaactataaaaaaaaaacttgttaagcttgacaagccggcttatttaactactactactactaataataataataataataataataactttattttatcaaatcttatcttatccagattttattccatctagattttatttcgtccagattttatttcatccaatcttatcttaacttgtccagattttattttatttcgtttgtgggcttggacttaaaatagatttgtgagcattggggctgaggacctatataacagcaccaaggttttagtttagggagttttttttcggataggagaataattctaggattttagaattccagtttttattactgttcatgtacactgttcatgtggaatagaattcgttttctgcaatttcgtttcgacttcaatctacagtttcatttctactaattaatggaaggctaagtctctagcattgttttctcttgaagatcaagcaaaactctctttgaggttttgttattactattgaatactaatcagtttttcctcttcacccatcactttgtatttgttgctattaatccatgcatgcttagtgcttgattaattgtctctgcgcttaatttatgttcatgcttaatgatcagtttcgttcatgattaattagtgtatgtgttgtttaatcacataatgacaaccttatgttaattttcgcttagtaatttaatttagggttggattaagtagttgaactgattaaggataaattctcgtaacctaggataaaagacttgcttgtgaatcaaggggaaacatgttttaattatgttattttctaattcaaatttgcttgttgtttaatttacaaaaacaaacaaccccccaattcgttactgttttattattatctgttataaacgtttggttgaccattgctcgttgggagacgacctaggatcacttcctagatattgcatttttaatgtttatttgattcgggtatggcctcgatcaatagtatataagatatgacttgagtagactaagatgaaattattgtagatatattttttaaaaaaatatttaatataattatatattcaaaaattggattaaaaattgttaatttaactaataataatttttgtttggctatattagtgtaaatcatctctaatccatacattttttaatattatgctctttttattttctttttatatactttgtgctttaacgacttgaattcaatatgattttgtttatcaattatttttggatttgtacattacttatacgaaattttacaagttttttttagttagtatttcactaggttttaaaataattaattaatcaaagacgtctttaagcaaacttttaaatagactcgtgggctaagccagacatttatgtaagccgagccgagcctaaaaaaaagcctatgacagataatgagtcgagttcaaaccttacgtattcaactcaagccgaactcaagcctaataaagcttggcttggcttgactcattttcaccctatgtgacactactagaaaaatctatgcacctttcaagtccctaaatttatgaacaaaagattcaggtgtcgtttattgaatttgttttatatggagtgtaaagtcatatccaatactaataagtgtatgtttatataattctttttaaaataattactcttctttatttacatctaataaaaatgttatcacattaattcttaaaataagctaaatgaagcatgtttcataagaaattaacttttactgtaattgttacattttttagtgacaaagggagatgggtgaagacggtgaaggaaaaaaaaatgaagataatgtctatgttgttcaaataacagtattaatagtattaaaatagttaatattaaaaaataaattagtaaatataacaacaaattgttgtgttggtgctatttattgtgcatcaaaatatgtaaaaataatagttaacttgtaattcgtatagttggtatgggatgttttatctatccttgattttgttatatcacacatataatcatttatatatatatgggctactattgtcactgccaaaaatgctattgagactaccaaagcatttgaaattacttggttatccttagttccatttccccacacctcctatccttcccctctttacgttcagctactctccctctttacatccaaaaacagaatttaaataaggctctcaaatttgaaaaaaagaagaagatagcaatgactacaaattgatcaacctgccaataataaaacttcggagtattctaagcaacactaaacagtgatgctacctaagcgaaaagattgaagtttgaaccacacatgatcaaggaaatgaaaataggcataccgccatgatctacaaatcagcaaaggagcaatcactatccagaatcccacaataaatccaattgtcatactgacaaaaaaccaattcactccatgcccatcacttccttcataactatgggttttcccattggagctgcagtttatgggcagtggtggaccacatagattgttgccgatgaagctggaggcatcaaaggtttgcaattgagttcctgttggaatatttcccttcaaatgattgtaagacaagtctagcatgctcagaaagctcaaatttgcaatggttggagggatttcaccagaaagttgattcctcgaaaaatcaatggactgtaatgatctcatattacctataccttgtggaatatgaccaatcaattggttgtgggacatgtttaaaaaattcaatccatttagatatgtgatttctcttggtatttcccctaataacttgttacttgacagatcaatgcttgttaccaaacccagaaagtttctgtactcatctcctcttcctttcagccatagtagcacactaactatactaactctggaagagtaatctggactccaaggagctacagaatagatacgaggatctgtactttggttcattagtgtcatggcactcaagttactgaaacagctcggtatattgccagacagattgtttcgtgcaaggtctaaaacctgaagatgactcatctggcatatttcatttggaatgtggccggcaaaattgtttgatcgaaggcgaaggattttcacatttaagaggttttctctaacccatgttggaatagttcctgaaagattattttccccaaggtccaaggatatcaattggttattcttcttcaaactggttggaaatattcctgagagtgtgttgttacgaatttgtaaagactgcaggtccaaggaacccatggattggggtaagttcccaacaaaatggttgctttgtaaatttacatccacaagagatgtccaattcatccagcaatcaggtatctctcctgacaaattatttgatgcaagattcagaaattctaattgcattggctcgtcctgatcgttacataaaaagtcattcatggattcagagaatgaattgcttgaaagatctaactgaagcacatcacttgaaagatagggtaatttaccaaacaagtgatttgagcttagatcaatagttgggacagatattggattctttaatgtagtcccaatctcaccatggatatgattacgagagaggcttaaatacaaaacctgagaaagtgcttcccacatctgtgtgggaatagaatcgaaaatccccgtgttagatagtccaacatattgaagttggttttgtgactgaatccacaatggaaagctgggacctaactgccatgatgtcacttccaaataggtaagttgaaaattaggaatccaattgggacccacttttaaagttaaattgttccccgatgcgacaaactccgtcaagcttgtaagatttgcaagatcatcttccttgacaactccgtgaaaaagattgccgtcaatatgaagagataacaatttagagagtgatccaagactttcaaatggatttccactgaatttattcatagagagatcgagatatcttaatgatgaaagttttccaaatgatctaggaagagcatcaccaattgagttgttggaaaaaagtaacgtgtcaatatttttaaatgccccaatatgatctgtcagattgcctgaaagtcgtgaactctgaactgcaagtgttgtgagtccatgggaaatacaaggagcaagaatttctaaaagttcattaacctgttggttgagtttgagatatgataaatctatcacccttaagttgcagagattacccaaagaagttggaatgtttccttcaagttgactatatgacaaatgaagttcaacaagagaagtcaaattacccaaagaagttggaatgtttccttcaagttgattacctgataaatcaagttcaacaagagaagtcaaaagagaagtcaaattacccaaagaagttggaatgtttccttcaagttgattacctgataaatcaagttcaacaagagaagtcaaatttcccaaggcatcagaaatagtcccatgcaagttgctggaacttaggtccaaagacgtgagacgatgaagaccgtataagcaatcaggtatagaagatgagaatgaattgaaagaaatggcaggggaataactagtaacggaaagatggagagtttgcagagatgagaagttgagcaaggatggttcattatagtgagggagtgtgcagtatgacaaatataggtgggtcaaagaaggaagagattggagagtgtgtagccaatgaaatgctttggataggtttgcataactcaaatgaagatattcaagcttccacatatttgatacccattctacattttcagcatgataatcacctccaagtccaagatacaccaaattggagagattcccaatctgagatggaatcttccccatcactccagtaagagagaggtcgaggtgagtcaaggaggtcattgcacaaaggaaagaaggaattgccataccttcaaaataattggcgctcaagtcaagatatcgaagcttagagagattcccgatctgagagggtactgttccgttggcaaaaacagaactcaggtcaagatacaccaaatttgagagattcccaatctgaggaggaatcttcccacggaatccagtatgagagaggttgaggtgagtcaaggaagtcattgtcccaaggaaagaaggaattgacatacctgctccaagaaatctattgccgctcaagtccaagtaattcaaatgctttaaatcagccaaacaaggacttatctctccaccaaactgggatctctcataagcttcctcatcgtagaaagcagaatcatagtagtcataatagaaagcatcagaaagtgaagagttgaggtgaagctgaagaacatgggaagtgacgttgtggcagaggactccataccagtggcaacagttggtatgattatgattccaagaccaaagcctatttgaaggatcattcagattattcttaatcttcaaaagtgtctcacgctcacttgggatgcacacactctctctgcatggtaagctacataaccaaaggtggagaaagacaagaatataaatggaggaggaattcatgatcatgcaagtgttgcttctgcatattaatcatcaaacttctattatttatactgctgccctgcctgttttttttcttcactttcattgttttttttacctttttttattattgtgcctaatactaaattatcgacttaattatccaattttctcgaattaattcttagaatacgaaaatttttgtatttactgtatcaatctccctttttaaaattcctatatacactacattcataaaaaaaatcaaaattaataacaaagaaatatgatttattcttgtgctgaatactaacataagaaacattctttttggtacagttttttttttttttttacaaaaataagtaagaatcattttattttaatttaccctataatactgcttaaatgaaaatctggtgtcattaaaattcaaattttaacttttatttaatcaatcctttcgttaaacttttgttacatacaaaagtccaatatttttttaaggaaaaatcaagtcttctatttcatcaaatcccaacccatgattaatattaaatcaagtcttctatttcaagccatgatgttaaggtctgacttcttcaacttgaaccataggtcactgcattaccttcatatcaaacaaatgttgcgagttaagtcaagcaaggaaaaaaaatataattgatgaataaatcaattataggaaaagagtttactttaaagacaattttggttaaaaaaatctataaaaaaaattatttcgttccaagctagctatttaattttgatcaatttttcaactcacaaaataatattcttcttatatgtgaaaaagactaattaatcttcattgtcattaatgattgttgtgttgtctatttctaattgtttttttaatcataatattattttcttttttattaaaaattaattagtgagatacaaagaagtttaaattgcttgtttagcttggtctatcataattattgagatcatagtttttccttttataagtcttgttccaaatttctccatgtattgtagatcatatttaacttaaaaagtaaattagaagatctacaaagaagtgtggcatgttttttaaattataaaattatggtcctagctatttattgttagaccacaagtcttcatatattaaagtttttgtctaaatttcatttatggtgatagtttaagaatagtgatagaagagaaaaataaatatacagtttattgaaatatctaactcaattaattgatgaatacatcaattatagaaaaagggtgtactttaaagactatttctattaaaatatctataaaaaaattatttcgttccaatataattatttaattttaatcaatttttcagttcacaaaataatattctcttatataggaaaaaaatactaaatttaattatcatcaattggaaaagttattgtgtcatgtatttttaattgtattcgaacttgaatattattttatttatcatataaaaattaattagttatataaaagaagtaaaaagaatattaactttttttctcaaaaaaaaaatcagtatcatattttatgttttttacaagttatcaacttaaataagaggagaaacataattttaatttccattttactttttaaataattgcaagtgccaaatttaaataatcatgagaatactcatgtttaatataatattctaaaaaaaaaatccatacgataacttaaacaatctacaaacaaatataatttattcttgtgctaaatactaaaacaagaaacatttttttattgtagtttactgtatagaattgcttaaatcaatgaaatttttattttaagaaaatattaatgatttttttaaaactttaagtagtttacatcaaagataattaaatttgacttaattagtcttcaaattttaactattattcaaatcaaacctttcgttaagtaaacaacaaaaagtcttgccttataaaattcaaatattctattacatgcggtttgaacccataattaattttaaactatcaaattttaattattcgaaataaaagaaatgaaaacaaaattgtctactagagaaaccgctggccactccaccaaatccatatcaaggtccccacttttccaacttgaaccataaactactccatcaagtccatgtgaaggtcctccaatttttcatcttgaaccttaggacactccacaaagtccagccatattaaggtctctgacttcttcaccttgatccatatcccataggccactccatcaatttcatgacaatgtccccccacttcttcaacttgaaccataggtcactacattaccttcatatcaagttctttataattgacaacaaatgtttagaattaagtaaggaaggaaaaaattataaatgatgaatacatcaattataggaaaagaatctaatttagagactatttagattaaaaaatctatataaaaaaagattattttgttcaaatttagttatttaattttgatttattttttaattcataaaataatattcttcttatatgtaaaaaaagactaattttcattgttattaattggaaagattgttgtgtcgtttatttctaatcgtattttaacctgaatattattttattttccattaaaagttaattagtgagatataaagaagtgtaaattgcttgtttaacttggtctatcataattattgagatcatagttttttctttaataagtcttggtccaaatttctccatgtattaaaaagtaaattagaagatctacaaattaagaagtgtgacatgttttttaaattataaaattatggccctagctatttattgttagaccacaagtcttcatatattaaagtttttgtctaaatttcatttacttatgtggtgatagtttaagaatagtgatagaagagaaaaataaatatacaatttattgaaatatttaactcccgtgtgcgaattagtcaaactcccttgtcactaggtccatcttgtgattaaaaatataatcaaacaattcaataaaacacaagtctaattgtcgctattgtaattcaaatattgcattatattttttatgttaataaattttttaaaaaagattggtgtttttagtagaatgaaagtaattaatagattgatttcaatgcattaattgaattctgatttgacttttaattaaaaaactgcatataaatgtttttaaaactattgtgtggtttccctggaaaatatttgaatttgaaaagattttttttatgaaattaaaattaaagatcaaaaatataaaagtttaaaactattgtgcgattttggtctattgtcagttccaattgggagaattggattggatccactaggcattgcaatttcaatccctccatccatcttactttgaatatttaacagatatttactggcatgacactagatgaaaggtagataatatgacaactatcatgttgcctaacacatactgaactaaacttttgatcccttagaatattgcagttataaggaagcagaagtgaataagccacatctaagggaccaaattaaacttacaaaattataatacctaatttacgtaatgcatggagatcaaaagtgaaatgaaactaaatataaattatgagagcattctaaatctgtcttcattgtctgaggagcaaaaggacctgacaagtgttttgtattttttttttgtacatgcatatatagtgtatatgctattctttttttctattttttccccctacatttatgatctcggaactgaaacagtgagagaaaccgatgtgaaaatagatagggtggatgaagaactagacatcggccagtggaagaaaatgaacagatggaaaaccatctttttgggtatttccctatttcttttataaagataccagctcctctctctctaatagacacactggtgatacaggtgtgatggaaaccctatatctgatagcttgaaactttattttgtatgcgggaattcaatacaactagtgacccttgtataaaacgataggaactaatatgaataaaaaaataatatttcatgatttttaaaatttaatcaatcatgatttgtcaaatgaacttgttaatgagtattatagaataagtgcatcaatactcaggaaatgggaatgtggaatgtatcagagtaaggaacagcgagagggaagatgtggaagagcttagaaactgcagaatcctatgcaagctccaactttctacactaattaaattcattcaggcaaattcttagttacatgttgtgtaaaacaatcttcttaaatccaatcaccgagtgtgtcatttcagttattttaatgctaatcattgttagtgcacagatagtagaagacaataatgcgtcataaatacaaaacagaatttgatactcaagtctcaagctcgtctagttctcttaacattaagaacatttaataccaatgaaagcaaaacagacagaacaccacagatgaacaggtacatagtatggtaaaccttttcacatttttaatggctagactaacacgttgtaatgtctcacttcttaacagttaacaggtaaactcataatttcccaagtaaccttcttaccttcaaaactatcatcacataaatcagatctctcaagtggtcaagataatgaaaataagcaagcctccaagttctgttgaagaaaacaacactgcaaaaaccccaaaatcctgctgcaaatccaactcccataccgatataaaactctgatgttccaaagaaattaccatcaccgtgtccaacagaagcactctccctcaaccattccttgtttgtgcaattttttgttacaggaggaccacaaagctcaggatttccagtgtagctaagttcatcaaagctctgaagttgggtgctcgtgggaattctgcctgataagttgtggtatgatagattcaggaaactgaggaaggacaaatcagataagctttgagggatttgacctgaaatgttgtttagcgagagatcaagggattctaacaatttcatttttcccatgtcatttggtatctctccagacagatgatttctagacaagttcaaaaaccgcaaagcaaatagcttggaaatttcagatggaattgctccagacagcttattacttgaaagatcaatcattctcaccaatatcagattgtctctgtactctaactcatcttttttgggaactaagacaagagtttccttgtagtggttataactgaagtcagagccatatgaataacttgaagggtttgcaaagaagtcatcttcaccagccattgttttcatgtcatccaaacaatttggaatggatcctgacaggctgttattgccaagatccagcactataagggaagaaagttgacacatcttttgagcaatgctgccattgaaattgttggatcttagacgaagaaccattagatattgcatttcccacatccaatctggtattgtgtcagaaagttggttatttcccatgtctatgaatttcattgtagagcaattttgcagtgttgaaggaatatatcctgagaagcggttgtcgtctaacagcaaagactcaagttgagacagataccccatggagtttggaatttcaccagacaaattgttactgcccaagttcacatgcaccaaagcttgccaatgcacccaacagtgaccaagatcaccagacaagacattatttgaaaaatcaagcacacttaacttattagtagcatttggatttccacataaaaagggagaaattgttccggaaattgagttattggcaacattcagcacttcaacatttgcagacacacttggcaatctacccttgaacaaattagaactcaaatttatcacgctggaatttagaaagatgttagataggtctccccttaacagattgtttgacagatccaggaattcaatttgcaaagtccaaatccaaaaccaacttggaaccaagtctgcaatacctgccttagacattgtcaaaaccttcacagaactttgcctttttagccattctggaaacttaggacctattccaaaggagctcagtaaaacatattcaagctgaaaaggaggagcccatccagagttgacactgaggaacaagtttgtccaagacaaacgtagttcctttaatgtaaaaagttttacaaaatttgactcttttatagatccttctaacaaattagatgaaaggtctaacgtcactaaatttgagagtgttccaagagttacaggcacatcaccagtcaaagaattagctccaagatttaatacctgcaggtttttgaggaactcaaaactcttaggaatggttccattcagtcagttgtgagcaaggtttaaagttctcaaggatgacaagtttgcaaatggtgagggaattggacaagtaaaggtattattactgagatctagaacttcaagatgcttaagctggcctaatgaatctggaagtggcccactgagttgattgttctgcaggtctagattttttatgttctgtaggcttgatattatttgtggaatttcaccctgtaaaaggttactgtgtaaatcaagttggacaagagttttgctgagattaaatagccatgaagggatttgctgattgagattgttatttgaaagagcaaggacttggagatgtgtgaagttggtttttccttttggtggtcctaagttatcaatttgacagctctccaagtgtagttctgaaagagatggaagtgcactcagtacttgaagccagttaccttgtttatgaaggtctgaaccactcaaatcaaggtactccaaggaagatagccttgatatccaattaaggttatctatctgaagagcataattgtatccaagattaaggtgctgcaggtttgagaggtttcctagttgatgagggattaatcccatgaacccacttaagctaaggtccaagtatctcagactctccaatgagcctaggaagcttggtattggagtaagaacaaaataatttgaactcaagtccaaatgattcaaatattttagtccaagcaaagaaggactaatctctccaatcaactccctatagggagagcccacaggtgtgtccagattgatttccatgacttgaccagtgttgttgcagggaacccctggccatgtacagcaatccgatttgtcagaccatgatgaaagcctgtttgaagggtctgctagtccatgcttgaagctgtggagtgcattcctttccttctcactgcaagtcatattgagccttgctgccttgcttgcactgaagtggagagttgttgcagtggacaatatcaagagaagaacatgagttgcaaatagcactgccatgaagaagaaggaagacgaaaaaggttgaatccacaattttctggttcacggttggtatttactactaacaatgcctatgtatgatatataccgtagaagggttagcatttaaaattttactccactaatggtggtggttgcaaaatgcacacatatgtagaggtatatatgtcaacaacgagacatttaggattaaaagtgtctaaccacaccaccattattttgcactagtttattttattttgatttaattactcttttagtccttatagtttattttattttgatttaattactcttttagtcctataatttaagacattcattttggtttctatatttacatttttgttacctttttgtcctcgcggggaagattcaactcacacataaacatgaacaaaattaataaaaatagggaagcaagctcaggtacaactgaagtgtaatggaggtatgagacaaaggcactacacattccattattcttgagtctgccaccgacctctgaaagcttagcatttgccaattgccatgatgtaatctccttcttgacagtctctcatcaagttggagtggtatcacagcattgaactaagttgatcgttccaatgggatgatggttttgattgctgcagataaagtgtgtgattgtgagtttctggttccatgagtaacagatcgaggtgtggtagtttgtgccttcatggttgggatgatgttgcaggtgccggtttcttgttgagagaaaagatgatcagccatgtctcgtgtgtgcataggagagtgtctttgccctctccataacattagtttcaacaattgactttagtcgaaacttgatggtgagaatcaaagagtaaaaaaaaaaaaaaattcaaccgggactaaaatagaatgatttaaactataagaactaaaaagaaatattgtcctaactttacaaaaggataattaaaccttttattttttttgtaaaaacaggtttggaatttgcaactttgaattctatctaattaagctctcagtctttcatttttgcaactctatttgggtagaaagagaagaaatctgggcctaactcaaatctaaaagctagttcatagggtgaggattgccctcaccttataaactctttcttgagattatctctaaccaatgtgagacttgaattttttttttttaattcacccctcacgtttaacactctttgggcatggtgcgtaatccttttgaatggatctaggatataccaagaaaaaatttgggcctaacggaaagaaaccaagtttgaagatacaacatttgatactataactgtttggtgttttgaaaatcccactcacatatttccaaatgttacagaagactttgattcagtggttattacgaattccttcctagccttttttaccaagtcagggaatttgcattgttgtgcatgatggctgccacaaggacccttgtaccaacccattagtgcaagtggtttttttcttaggagaattgagaaacaaatgatgtgttttataaaaggaattcttttgctttgaattttgaacttataatgttttttgtttccctcacagaacaagtgatgaaactcttgacgccatacgtacgcctactttgatgctcttttttcattccacttttatcttaatggtatctcaagttaattagaatgtacgtataataaaataatgagaatggcaactactagtagtacttaattagaaaaaaaactatcaaaactaaaacgaaaataactttgatgatgttaatacatgagtttaatttagatagacagtgtaaaaatttaaattgttaattaattagatatcacctaatgatttgtaaaacaattactaaaaaaagttataggagaatatatatagttaattgcaattctaagtgtatttaaatagaattcttaattaacatatccttattgtgattttttgtatattttttatttattgagacagtggaatgagaccgcactataattttcatcacgggtgtggttgtcaaatataatagggatggttagtgaggaattttggaatgttagttggttttcgactatagcctcttgttcagtgttaacattttcattagagttaagttgcttttagggaagaacaaatgtcttgaaattccctcttctccagaagcagttttattgtgtctttatcgaagccatcttctccagaagcagttttattagtgttatgtttttttatatattttttatatttatttcttttcaaatttgatgacaacattgtcatttggtctttctacccttcacatcagcaaattggacaataaagagactcggtcagaaacaaataactactaggggtaaaataacacgagagaatttaacacttttggaataggaaaatgtacttttttttaagaaaataaaattatgtttttaatccatgatttatattcgactttttatttgatcttttgacaatttttttcttcaacgaaaatctctaatatttgaaatcttttgctttaaatttctatcattagttaaataataatgtatcggttaaatattcggtagattgttgcagtggtctcacacaagccatgaagaccaacaagaagtgtgtctgccttattctcaaagacagggatgatcctgaccttggcttgaagattaacatgacaattgctgttggtctcccttctctttgcaaaactcctgataatctcagggattacgtttagccgcgacagcattagtgcactgcagttagttaggggacagagatagtgcttttcccaaattctgttatcctcaaattctgttattatctgctagaaaacaataagcagtgtaaattgagagggaacttgaataagattaaaacagaagaagctgagaaaacattttcccgttgtttttgtttttttggattttagaacacttattttggataggattctccaaacttatatattttggataagaaattgattactaagtagtctaaaattattttataaaacagtttcttaactgagaatactcaggccctaaatcttccaattttagtatatttctaaaaaaattagtgcactgcagttagttaggggacagagatagtgcttttcccaaattctgttatcctcaaattctgttataacagagtttgttattatctgctagaaaacaataagcagtgtaagcctataaatgtcaagagaaaaggaatgaaaaagcacagaacagaatttgaatttgcttatcttctctttatttccttcgttttgctcttagcagatagcctctgctatcagttcttcagactgtttggcggagaatgatgtgagacacagaatgtgaaattgagagggaacttgaataagattaaaacagaagaagctgagaaaacaatttcccgttgtttttgtttttttggattttagaggattctccaaacttatatattttggataagaaattgattactaagttgtctaaaattattttataaaacagtttcttaactgggaatactcaggccctaaatcttccaattttagtaaaacttcgtaccccattgtccggaggctcttcgctatgcgaaggtatgggggagggatgttgtacgcagccttacccttgcatatgcaaagaggctgtttccggattcgaacccatgaccaacaagtcaccaagatatttctaaaaagatcagaatatttgtggtctaagttttatcattatcaagcctttcattttccataaagaacaaaagagtgttacattccatttactatgtaatgaatggtcaacaagtcatgtacttcaaacttttctacttttctcattcataactagacaataacacattttaaaggggaaaaaaagggcatctaaatctgccaattttactttgtttgtgtatctgttatctctgagttttcaactgtgaaagttaaaaatatttgaggtttgattttttctcaagaaattcttgtttgaaacgatttgaacagcacttctgcacttggatcctaaatcacctgaagtactaaatttgagtttgagtttcaatggtgtagtactaaattttgcatttacttttaatgtgttcttttgtgcattcagctgaaggaagttcccagaatggtagaaaccaggggacagatgaaatggccacagctaagaagaatagtgcgtcttatatcgggaagagattgttagaaagtttggttgcagttgcagggcttctaatttggctttcatgagctttactcaaatactacctatatattaccattctcatatcatgttgaaacgtaaaccattgattagttgatagtgtaaaaatatttacactcgagtgtattaaatctctgacagactcacaatagatattattgcaaaaccttattggagatttattttggtgagcattatgcctttaatctcatacaactaaatgcttgttacacaaatcttattgttcagtcctaaaattcttttatctctaataagaaataacgacttgttgtaatagaaattaaaatcttattatttttttaagtacacttgaggatgattttggtatcccacttttcaattgctcggttcgtttccatattttcaaattttacaaatttgattcattagttaacttaattgatatcaaattttacattttggtatccatatttacaaaattaacaaactaatttttttttcctcgtaaagtctaaaactgataattcgtcaagcatgatatggtttctttagccaagtacaagataatctagattctactttgtatccttccaagatagtctaagaatgaatgagttaagttgaatatggaaaaacaaatattcattaagatgttatggtttgattatcccaataacttttctcccatgattcaacttgttgaattgagctttcctttctctctaatgttgcatacaaagttggagggtcaaaaggggcaggcatggtgcaagggtcggtatttgcaggaaccttgaccaatgattccatcataaatttctttactgatccttctgcttctccaaaccattgactcaaacaaagctaataagaagtgtgatacctgggcaaataaacgagcattccaatcttgattttcataaacattgcatttaatgagatcttgtctggtttcagcaacagctggattacctttccagtaagcataaggctctctgttcagccatggtatcctcgtagtgccttctttcaaccctcccaacaaaatatgccatggctttatattaatctctgccctgtgcaccacacatacaatacttttcaacaacaacaaccacccaattatgaagcaagtgtagagtctaaatccatgggcattataagaatgattagggacttgtgttaactaccccaattaggacaatattctaactatggtggttgtgaattttttttataggacaaagaaattaatggtgctgatggcgtcaacaaattccaatcaggggaagaagaggaagataaggaacagtgcagtccagtatctgttttagacccacccttcgatgacgatgatgatgggcatgatgatgaccatgaaggggatggttttgatttggactgtagctatcccaatgtacaaagtatgtcattgtttaaaaatattttattttattttgtagcattttatgttgtgtggtcgtcttccatcaacatgccatcgtacacgcttcttcaaagttgattgtctgttacaaaataccataagctgagatgttttgtgctaatgccacctatctttggtgggttccattggaagattgcaatagctcatcatccaacatgcatttcgcattcaatgtgaaattggactactctttgttcagagctataaatttcaacatgacccacaaattatgttcattctcattcttggcgctgttagtctagtgtgaaaaccgacaaattcagtttcctgttatatatggcactctatataaaaaggaaatcaaaaaaagtagaatttgattatggctaatttcacccattatatttattacaagaaaacctttagatacaaattattttttttgtacttttagcttggtcgtaaacattaacgttacatcacgcacacacacataaaaggcaaatcaaattattttatatccctaaattttatgaggaaggatgctataaatattaacaatacatctcacacacacaaagacatctaaaattatatcactaagttttatgatgtgttacggtttgctttaaaatatggtacaaggtttatcagagaccggcttacaagtaaaaattaaatttgtcataaagggagtaaaatggaaaataattaatttcttgattagaattaaattagaataagctgtgcagatcttataatttttgttcactaattcgcccaccacataatgttttaatttttccaactttgtataatctaaaaagtataaaaatgaagattacgactttcagcctccagttccttttaatggaagaagtgagtaaatgttgatgcgatatcggtagctttcatgggcagtgaccttgtcaaagaatgcttgggccatgatcattcaaaaatacccttaattgatctttagctcaacattttgtataatacgttaattaattttttaaaattatgattactatcaattatttaattcttaaaactgttaaacaaaagacattttgtttatttgttgatatttttataaggttaaaatatatttttaatcttataaatatttaaatattgaaaagttatttgaataaaattttaatatatttttcgttctcataaaaataaaatatattatttttttcttgaagtaagatttaaacattccaaattatttattacacttttgattatatgtataattaatgtaaaaataatatatttacatcgattatatatatgtataatcaatataaaaattcataatttaaatttatctgaatctacattcagaccaaataataataatgtattttaattttgtaaagataaaaaaatttattaaatttttacaaaaatgaattccaaaaatttatatatttatcaaataaaaaattagccaagatacttcctgcgattttgttatcactcttctgtttcaggcttcatattccgttagttttggttgtaattaatactgatcctggaacacttgaatattaattcattttgactcttcaaaaaaattgttttataaagataaattatttagtattttttgtgttaatttttaagtaaagttaacatttcaatttgataatcaattttaaaagctgacttttattattatataaagtaaaacttgaaaaagcaaaacgaataatacttaaaaagttacacctattatttgccctttttatagttatggtaatttagaatattactccaacaattttgttggttctcaagcatcattggttatctatggatatctcatcaaagttcttggcctggccggcttggagagtcaagtcttgtatgcagccacgagtcacgactttaattaacacgaaagaactaattattcacttcaatggttagtgactaaaattaaatataagtttttttcctattaaaccacgttttcttgaaccactagtcccccattttttggaaacaagaatgtgatacacagaattgaacaactagttgatcttaactacaaatatgctcaatatgcaaatatgtacgtcccaaaacagaatttaaataagactctcaaatttaaaaaaaaaaaaaaaaggaaagaagatagcaataactacaatgcaaattgaacaacctggcaatacaatgatacaacatcggttgtaagcaacactaaacagtgatactatacgaggaaaaagattgaagtttgaaccacagatgatcaaggaaatgaaaatagacatgccgccatgatctacaaatcagcaaaggagcaatcactatccaaagtcccacaacaaatccaattgtcgcactaacaaaaaaccaattcactccatgcccatgacttccttcataactatgagttttcccattggagctgcagtttatgggcagtggtggaccacatagattgttgccaatgaatctggaggcatcaaaggtttgcaattgagttcctgttggaatttttcccttcaaatgattataagacacgtctagcatgctcagaaagctcaaattagaaatggttggaggaatttcaccagaaatttgattcctcgaaaaatcaatggtttgtaacgatcccatattatcaataccttctggaataggaccaatcaattggttgtgggacaagttcaaaaagttcaatccatttagatctgtgatttctctaggaatttctcctaataatttgttacttgacagatcaatacttgttaccaaacccagaatgtttccatactcatctcctcttccttttagccatagtagcacactaactatacctgataccgaagagtatcgtgtatcatttggtgcatgagaatagataaggggatatgtactccggttcactagtgtcatggcactcaagttacggaaacagctgggtatattgccagacaaattattttttgcaaggtctaaaacctgaagaagactcatctgacatatttcatttggaatgtgaccggaaaaactgtttgatcgaaggcggaggattttcatatttgagagcttttctccaacccatgttggaatacatcctgaaagattattttctccaagatccaaggatatcaattggctagtcttcttcaaactggtaggaaatattcccgagagcaagttgttacgaatttctaatgactgcagctcagccaaggaacccatggatggggggaagttcccaacaaaatggttgctttgtaaattcacttccactagaaatggccaattaatccaacaatcaggtattctcctgacagattattgatgcaagatgagaannnnnnnnnnnnnnnnnnnnnnnnnnnnnnnnnnnnnnnnnnnnnnnnnnnnnnnnnnnnnnnnnnnnnnnnnnnnnnnnnnnnnnnnnnnnnnnnnnnnnnnnnnnnnnnnnnnnnnnnnnnnnnnnnnnnnnnnnnnnnnnnnnnnnnnnnnnnnnnnnnnnnnnnnnnnnnnnnnnnnnnnnnnnnnnnnnnnnnnnnnnnnnnnnnnnnnnnnnnnnnnnnnnnnnnnnnnnnnnnnnnnnnnnnnnnnnnnnnnnnnnnnnnnnnnnnnnnnnnnnnnnnnnnnnnnnnnnnnnnnnnnnnnnnnnnnnnnnnnnnnnnnnnnnnnnnnnnnnnnnnnnnnnnnnnnnnnnnnnnnnnnnnnnnnnnnnnnnnnnnnnnnnnnnnnnnnnnnnnnnnnnnnnnnnnnnnnnnnnnnnnnnnnnnnnnnnnnnnnnnnnnnnnnnnnnnnnnnnnnnnnnnnnnnnnnnnnnnnnnnnnnnnnnnnnnnnnnnnnnnnnnnnnnnnnnnnnnnnnnnnnnnnnnnnnnnnnnnnnnnnnnnnnnnnnnnnnnnnnnnnnnnnnnnnnnnnnnnnnnnnnnnnnnnnnnnnnnnnnnnnnnnnnnnnnnngagatttcccaaaaatgtgggaattgttccttcaagttgattacgtgataaatcaagttcaacaagagaagtcaaatttcccaaagaatttggaatggttccttcaagttgattagatgacaaatgaagttcgacaagagaagtcaaatttcccaaagaagttggaatggttccttcaagttgattatataacaaatgaagttcaacaagagaagtcaaatttcccagggcatcagaaatagtcccatgtaagttgttgtccattaggttcaggaacttgagacgatgaagaccgtataagcaatcaggtatagaagatgagaatgaattgaaagacaagtcaagattttgaagaagtgtgaggtttcgaataccacaaggaatcggaccttggatttcataattatctgataattgaagagaaacaagtttcttcaatttgaatatccacttggggacaaaagaaatggcaggggaataactagtgaaggaaagatggagagtttgcagagatgagaagttgagcaaggatggttcattatagtgagggagtgtgcattctaacaaatataggtgggtcaaagaaggaagagattggagagtgtgtagccaatcaaatgctttggataggtttgcattactcaaatcaagatattcaagcttccacatacttgatacccattctacattttcagctaacagaggctcggaagcataacttccgaggtcaagatagaccaaattggagagattcccaatctgagatggaatcttcctcatgaatccagtattagagaggtcgaggtgagtcaaggaggtcattgcacaaaggaaagaaggaattgccataccttctccaagaaatctattgcggctcaagtcaagatatcgaagcttagagagattcccgatctgagagggtactgttctgttggcaacatatctcaggtcaagatacaccaaatttgagagattcccaatctgaggaggaatcttcccacggaatccagtataagagaggttgaggtgagttaaggaagtcattgtcccaaggaaagaaggaattgacataccttctccaaggaaataattgccgctcaagtccaagtaattcaaatgctttaaatcagccaaacaaggacttatctctccaccaaagctccatctcctataagcttcctcatcgaagagattattataattgtaatcatagttgtcccctgtcatagaaagcagcagaaaacgtagtgttgaggtgaagctgaagaagatgggaagtgacgttgtggcagaggactccataccagtggcaacagttggtatgattatgattccaagaccaaagcctattggaaggatctatgagattattcttaaacttcaaaagtgtctcacgctcacttgggatgcacacactctctctgcatggtaagctcaacaaccaaaggtggagaaagacaagaatataaatggaggaattcatgatcacacaagaatatatagaaaacaagtgtagttgttggttctgcatataaatcatcaaacttctattatttatactgctgccctgcctgtttttttttcttcactttcattattttttaccttttttattattgtgccaaatactaaaatattcttccattctttttttacgctggcctctttaaattatcaaattttaattattatttaatcaatccttccgttaaacttttgttacgtacaaaagtccaacatttttttaagaaaaaatcaagtcttttatttcatcaaatttaatattaaattatcaaattttcaatattcaaaactaaaaataatgtaaaagaaaattgtcttctaaatcatagcttacaccatcaagtcaatctcaaggtttttcattttttcatcttgaacctttggacacttcacaaagtccagccatgatgttaaggtctgacttcttcaacttgaaccataggtcactgcattaattaccttcatatcaagttccctgtcattgacaacacatgttgcaagttgagtcaagcaaggaaaaaaaatattattgatgaataaatcaattataggaaaagagtttactttaaagactattttggttaaaaaaatctataaaaaaaattatttcattccaagctagctatttaattttgatcaatttttcaattcacaaaataatattcttcttatatgtgaaaatgactaattaatcttcattgtcattaatgattgttgtgttgtctatttctaattgtttttttaatcataatattattttctttttattaaaaattaattagtgagatacaaagaagtttaacttgatctatcataattattgagatcatagtttttccttttataagtcttggtctaaatttctccatgtattgtagatcatatttaacttaaaaagtaaattagaagatctacaaagaagtgtgacatgttttttaaattataaaattatggtcctagctatttattgttagaccacaagttttcatatattaaagtttttgtctaaatttcatttatggtgatagtttaagaatagtgatagaagacaaaaataaatattcaatttattgaaatatctaactcaattaattgatgaatacatcaattataggaaaagggtgtactttaaagactatttctattaaaaaatctataaaaaaattatttccttccaatctaattatttaattttaatcaatttttcagttcacaaaataatattctcttatataggaaaaaaagactagatttaattatcatcaattggaaaagtaattgtgtcatgcatttataattgtattctaacttgaatattattttatttatcatataaaaattaattagttatataaaagaagtaaaaataatattaactttttttctgaaaaaaaaatcagtgtcatattttatattttttacaagttatcaacttaaataagaggagaaacataattttaatttccattttactttttaaataattgcaagtgccaaatttaaataattatgagaatcacgttcaatataatattctaaaaaaaatccatatgataacttaaacaatctataaagaaatataatttattcttgtgccaaatactaaaacaaaaaacattttttattttagtttaccgtatagaactgcttaaatcaatgaaatttttattttaagaaaatattaatgattttttttaaaactttaagtagtttacatcaaagataattaaatttggcttaattagtcttcaaattttaactattattcatatcaatcctttcgttaaacctgtacgtgttaagtaaacaacaaaaagtcttgtcttataaaattcaaacattctatgacatgcggtttgaactcataattaattttaaactatcaaattttaattattcaaaataaaagaaatgaaaacaaaattgtctcctagagaaaccgctggccactccaccaaattcatatcaaggtccccacttttccaacttgaaccatagactactccatcaaatctatgtcaaggtcctccatttcaaggtccccacttttccaacttgaaccatagactacttcaaccttaggacactccacaaagtccacccatattaaggtctctgccttcttcaacttctgcaacgcatatatagaaaacaacttaattgtataagtgcttcttgcttctgcatataaatcataaaacttctattatttatactgctgcaagtgtctttcttgactttttttcttttttttatgatgtttcctttttttaattattgactttattatccaattctcccgagttaattcttagaataggaaataattttgaatttactttatctatctccctttttaaaattcctatatacacaaaattttatattgaatttaactattatttaatatatcctttcgttaaacttttgttaattaaacaataaaagtccaacattttattaaaaaaattcaagtcttctatttcatggactccatcaagtcttttattaaaagtccaacttttgttaattcaagtcttttacaaaattttgttaattcaacttttgttaattattacaaaatttggtattgaatttaactattatttaattcaagccttttattaaaagttcaaattttgttaatttaaatattattttgttaattaaaccatagctgactccatcaagtcgtattttttcatcttgaacctttggacactccacaaagtccagccatgttatggtctctggcttcaacttgaaccatagcctgggccacaaacaatatattaatgataaatacatcaattataggaaaatggtctaatttaaagactatttcagttaaaaaatctatataaaaaaaattatttcgttcatatcttggtatttaattttgatcaattttttaattcacaaaataatattctcttatatatgaaaaagctagactagatttaatcgtcatttggaatggttgttgtgtgatctatttctaattgtattcaaacatgaatattattttcattatcatataaaaattaattggtgatataaaaagaagtgtgaaaaagaatattaatttttttctaaaaaaaattagtagcatattttgtatttttttacacgtcatcaacttaaataataggagaaacataattttaatttccattttaatttttaaataattttaattgccaaatttaagcaatcataaaatttctcatgttcaatataatattctaaaaaaaaatattcatatgataacttaaataatctactaagaaatatgatttattcttatgcagatcgaatactaaaataagaaaaaaaaatattttagatcacaatataaaattgcttaaatcaatgaaatttcattttaagaaaatattaataatttttaatactttaaatcaaagataattaaatttggtttaattagtcttcaaattttaactattatttaaatcaatcctttcattacacctttgttaagtaaatgatagcatagcaagcaaggaggtgctagcagtaacactctcacaaagataaagatctttaagccatcattttttttccttttcttttctatgaactgtcatttcttatctctacatggaatgtctagaagttgaaaacttgagctttctttaactatactgctttccattttggcgaactgcttttctttctcataatgaactttccacttccaatgatggttcaacattaataattctttatctattttgtctaaaaatttccaatcactttttgtgagtggtgtgaatgtcatgcagacaaatgatgtccaagctccactttttccattcattgcaagttgtaagcagaatgtagaatgtacgtataataaaataatgagaatgccaactactagtacgtagtacttaattaaaacaaaagtatcaaaattagaacaaaaataactttgatgctgttaatacatgagtttaattttgatacacagtgtaaaaatttaaattgttaattaattagaaatcacctaatgatttgtaaaacaattactaaaaaaagtttcatttgaaacttagtcttccacccgtctcaagctctccacatgaacactaagctctagacaaaaataaataaataaccacgagaaataatatataactctttagtggacaattggtgttcttttgtgcattcagttgaaggaagttcccagaatggtagaaagcaagggacagatgaaacggccacagctaagaatagtgcatcttatatcgggaagagattgttagaaagtttggttgcagttgcagggcttataatttggctttcatgagcattactcaaatactacctatatattaccactttcatatcacaaaatgtcttgccttataaaatttaaatattctattacttgcagtttgaatccataattaaatttaaaatatcaattttttattattccaaataaaagaaatgaaaacaaaattgtctagtctcctagacaaaccacttcccactccaccaaattcatatcaaggaccccacttttctcacttgaaccatagactactccatcaagtccaagtcaatgtccttcattttttcatcttgaatcttaggacactccacagccaaccatatttaggtctctatcttcttcaacatgaaccataggtcactacattaccttcatatctagttccttatcattgacaacaaatgtttagaattaagtaagcaaggaaaaaaattataaatgatgaatacatcaattataggaaaatgatctaatttaaagactatttcggttaaaaaatctatataaaaaaagactctttcgcttcaatctaactatttaattttgatctattttttaatttacaaaataatattcttcttatatgtggaaaaaaactaattttcattgtcattaatcggaaagattgttgtgtcgtctatttctaattgtatttaagcctgaatattatattctttttctttaataattattgagatcataacttttttcttttataaatcttggtccaaatttcttcatatattgtagatcatatttagcttaaaaagtaaatcttggtccaaatttcttcatatattgtagatcatatttagcttaaaaagtaaattagaggatatgatataccaagaagtgtgacatgtttttttaaattatttatctatggccttagctattttattgttagaccacaagtcttcatatattaaagtctttgtctgaatttcatttacttgtgtggtgatattttaagaatagtgatagaagagaaaaataaatatataatttattgaaatatctaacttatgaagatttgcattcttaatgcataagcttttcagtttatatattatcattatttggaaatatttgttgtgttaattgtctatttctaattaatttgaaaatgaatcttaattttttatcataaaaattagtatcatattttttattttctttacaagttatcaacttaaatactaataggagcaacataattttaatttccattttactttttaaataattttaagtgccaaatttaagcaatcataaaaatactcacgttcaatataatatttttaaaaaataattcatgagatcacttaaataatctacaaaaaaatataatttattcttgtgccaaataaacaacaaaaaaagtcttgcattattaaattcaagtcttctattacatgcaatttgaacctataactaattttaaatgatcaaatttttagtattcaaaataaaagaaaagaaaaaaaaattgtcttctagacaaaccacagacaactccaccaaatccatatcaaggtccccactttttcaacttgaaccataggccactccatcaaatctatgccaaagtttcttatcattgacaacaaatgttgagagttaagttaagcatgaaaaaaaaatagggtaaaatatatcatttctatccctataaaattttaatgtgctactttttttttatcctgagttaagtttggatgatagataattatcatgcattcttagatttttgtgtcattttaggatatttatgtgatatatgtcttttatggttttttattgtcatgaactaatcttctcttttgttggagttgaatataattggttcatttttcatgtaatgactattttttttattgaataaagcattctaattgtttctcttctatgtttaatacgtgtttttggcttaatcacctgtttgtatgatttttttttcaattgtaattaaaaaaattctttgaactacgaattgcaaaaaacacctaataatttttatgtctagaaataagataaaaataattgagcatcaataaacactttatcttaatgaaaatcatttagttatattaatttaaggaattgatagtgtaatcaaggaatttaggtctctttactaggaattaaagtgaagataatatgatgggtttatgataatataacctttattaaatatgaatgtgtagttattaggtgatagaaattaaaccccaacaattttttcattgatttaaccccaacaattacatggggtgtttgttaagtcattggtagtgcacagatagtagaagacaataatgcgtcataaatacaaaacagaatttgatgctcaagtctgaagctcgtctagttctcttaacattaagaacatttattaccaatgaaagcaaaacaaacagacaccccatatgaacatgtacatagtatggtaaaccttttcacatttttaatgtctagaataacacgttgtaatgtctctcactcctaacagtttaacatgtgttcccactttttcaatattgtgtgtcatttcagttattttaatgctaatcattgttagtgcacagatagtagaagacaataatgcgtcataaatacaaaacagaatttgatactaagtctgaagctcgtctagttctcttaacattaagaacatttattaccaatgaaagcaaaacaaacagacaccccatatgaacatgtacatagtatggtaaaccttttcacatttttaatgtctagaataacacgttgtaatgtctctcactcctaacagttaacatgtaaactcacaatttcccaagtaaccttcttaccttcaaaactattatcacataaatcagatctctcaagtggtcaagataatgaaaataagcacgcctccaagttctgttgaagaaaacaacactgcaaaaaccccaaaatcctgctgcaaatccaactcccataccgatataaaactctgatgttccaaagaaattaccatcaccgtgtccaacagaagcactctctgtcaactcttccttgtctgtgcaattttttgtcacaggaggaccacaaagctcaggatttccagtgtagctaagttcttcaaagctctgaagttgggtgctcgtgggaattctgcctgataagttgttgtatgatagattcaggacactgaggaaggacaaatcagataagctttgagggatttgacctgaaatgttgtttagtgagagatcaagggattctaacaatttcatttttcccatgtcatttggtatccctccagacagatgatttctagacaagttcaaaaaccgcaaagcagatagcttggaaatttcagatggaattgctccagacagcttattacttgaaagatcagtcattctcaccaatatcagattgtctctgtactctaactcatctcctttgggaactaagacaagagtttccttgtagtggttataactgaagtcagagccatatgaataacttaaagggttggcaaagaagtcatcttcaccagccattgtcttcatgtcatccaaacaatttggaatggatcctgacaggctgttattgccaagatccagcactataagggaagaaagttgacaaatcttttcagtaatgctgccattgaaattgttggatcttagacgaagaaccattagatatttcatttcccacatccaatctggtattgcgtcagaaagttggttattgcccatgtcaatgaatttcattgtagagcaattttgcagtgttgaaggaatatatccagagaagcggttgtcgtctaacaacaaagactcaagttgagatagataccccatggagtttggaataacaccagacaaattgttaccacccaagttcaaatgcaccaatgcttgccaatgcacccaacagtgaccaagatcaccatataagacattatttgaaaaatcaagcacacttaacttattagtagcattttcctttccacataaaaaggaagaaattgttccggaaattgagttattggcaacattcagcacttcaacatttgcaggcacacttggcaatgtacccttgaacaaattagaactcaaatttatgacgctggaattgagaaagatgttagataggtctccacttaactgattgtttgacagatccaggaattcaatttgcaaagtccaattccaaaaccaacttggaaccaagtctgcgatacctgccttagacattgtcaaaaccttcacagaactttgcctttttagccattctggaaagttaggacctattccaaaggagctcagtaaaacatattcaagctgaaaaggaggaacccatcctgagttgacactgaggaacaagtttgtccaagacaaacgtagttcctttaatttcaaaagttttacaaaatttgactcttttatagatccttctaacaaattagatgaaaggtctaacatcactaaatttgagagagttccaagagttacaggcatatcaccagtcaaagaattagttcctagatttaatacctgcaggtttctgaggagctcaaaactcttaggaatggttccattcagtcggttgtgagccaggtttaaagttctcaaggatgacaagtttgcaaatggtgagggaattggacaagtaaaggtattattactgagatttagaacttcaagatgcttaagctggcctaatgaatctggaagtggcccactgagctggttgttctgcaggtctagattttttatgttctgaaggcttgatattatttgtggaatttgtccctgtaaaaggttactgtgtaaatcaagttggacaagagttgtgctgagattaaatagccatgaagggatttgctgattgagattgttaattgaaagatcaaggacttggagatgtgtgaagttggtttttccttttggtggtcctaagttatcaatttgacagctctccaagtgtagttctgaaagagatggaagtgcactcagtacttgaagccagttaccttgtttatgaaggtctgaaccactcaaatcaaggtactctaaggaagatagccttgatatccaattaaggttatctatctgaagagcataattgtatccaagattaaggtgctgcaggtttgagaggtttcctagttgatgagggattaatcccatgaacccacttaagctaaggtccaagtatctcagactctccaatgagcctaggaagcttggtattggagtaagaacaaaataatttgaactcaagtccaaacgattcaaatattttagttcaagcaaagaaggactaatctctccactcaactccctatagggagagcccgcaggtgtgtcaagattgatttccatgactttacctgtgttgttgcagtgaacccctggccatgtacagcaatccgatttgtcagaccatgatgaaagcctgtttgaagggtctgctagtccatgcttgaagctgaggagtgcattcctttccttctctctgcaagtcatattgagccttgctgccttgcttgcactgaagtggagagttgttgcagtggacaatatcaagagaagaacatgagttgcaaatagcactgccatgaagaagaaggaagacgaaaaaggttgaatccacaattttctggttcacggttggtatttactactaacaatgcctatataggatatataccatagaagggtttgcatttaaaattttattccactaatggtggtggttgcaaaatgcacacatatgtagaggtatatatgtctacaacgagacatttaggaataaaagtgtctaaccacaccaccattattttgcactagtttgttttattttgatttaactacctttttagtccttatagttgtgataatttttcttttagtccctatagtttaagacatttattttggttcctatatttacaattttttttatcttttggtcctcacggggaagattcaactcacacataaacatgaacaaaattaataaaaatagggaagcaagctgaggtacaactgaagtgtaatggaggtatgagacaaagccactacacattccattattcttgagtctgccaccgacctctgcaagcttagcattttccaattgccatgatgtaatctccttctcatcaagttggagtggtatcacagcattgaactaagttgatcgttccaatgggatgatggttttgattgctgcagataaagtgtgtgattgtgagtttctggtcccatgagtaacagaggtgaggtagtttgtgccttcatggttgggatgatgttgcaggtgccggtttgttgttgagagaaaagatgatcagccacgtctcgtgtgtgcataggagagtgtctttgccctctccacaacattagtttcaacaactgacgttagtcgaaactggatggtgagaatcaaaagagtaaaaaataaattcaactgagactaaagtagaatgatttaaactataaggactaaaaaaaatatagtagtaactttaaggatcaaaaggataattaaaccttttatttatttatttttttgtaacgggttatatatacgtagcagtttattctagacaatggactacgtgtgaaatctttgaattctatgtaagaaatgttatttcaaacttctcatcagtcttcatgtcaatgatgacatgctccattcgaattctatgtctaattaaactctcagtcttccgtttttgcaactttattttggtagaaagaaaccaaatttgaagatacaacatttgatactataactgtttgaagttttgaaaatctcactcacatatttccaaatgttacaaaagaatttgattcagtggtttttacgaattccttcctagccttttttaccaagtcagggaatttgcattgttgtgcatgatggctgccacaaggaccattgtaccaacccattagtgcaagtggttttttcttatgagaattgagaaacaaattatatatgtgttttataaagggaattctattatttttaattttgaacttgtaatgttttttgtttccctcacagaacaagtgatgtgactcttgatcgacgccatacgtacgcatactttgatgctcttttttcacaccacttttatcttaatggtatctcaagttgacaatcataaattaaaatagctaactatagttgattagtagagacaaacagctcatagataaagatctttaagccatcatttttttttccttttcttttctatgaactgtcatttcttatctctacatggaatgtctagaagttgaaaattacttgagctttctttacctactgctttccattttggcgaactgcttttctttctcataatgaactttccacttccaatgatggttgaacattaataattcttcatctattttgtctaaaaatttccactcactttggtgagtggtgtgaatgtcatgcagacaaatgatgtccaagctccactttttccattcattgcaagttgtaagcagaatgtagaatgtacgtataataaaataatgagaatggcaactgctagtactacttaattagaacaaaagtatcaaaattaaaacgaaaataactttgatgctgttaatatatgagtttaattttgatagatagtgtaaaaatttaaattgttaattaattagaaatcaccaaatgatttgtaaaacaattactaaaaaagttataggaaatatatataattaattaattgcaaatgaaagtgtatttaaattaaattcttaattaacatatccttattgtgatattttgtatattttttatttaattgagacagtggaatgagaccgcactataattttcatcacgggtgtggttgtcaaatataatagggatggttggtgaggaattttggaatgttagttggttttagactatagcagttttcacattctcattagagttaagttgcttttggggaagaaccaatgtcttgaaattccctcttcaccagaagcagttttattgtgtctttatcgaagtcatcttctccagagacttgcctttaactttgaagataggaaatagatcagtcaaacattgtttcagtttatttggattttttttgaatgacgtgtgatttacaaagacttcttacaactcacaacctttggaatttctctatgcctggttaacccacaatttctggcgcctgttgcggttaggaacataggctagcaaaaacactaatcatttcaagagaaatgttaacacacttttctaatatattattttttatattaaaatttatttaaataaaaaattcagctgatctcatattttatttagcaaatttttctcatatattaagtcttaggtttttaaaattataaagctaaaactaaaatgttttactaaatgtattttaaagtaaattttacacacaaaaatattatgattttataaaaattgtttggtcaagggagacatattgagggtttctatctttctttttcccacttaatttttgactttggcagcaagggttaaacctaccacatctacatgactatgtcttactttccaataagttacacctaaatagctaacatattcctcttgctcacgcacactatctttcgtaaacttttcacgatcatctttatattatcaaattcatttaattaaatatacaattatcttaatattataagcaagtctctgtataatcatgtagtgtttctaaattgaatgagcctaaatcacacactcctgaaaaaaggataaaaacatatttaatttcatttagtgtttaatagtgttttggtctttttttttttgtttttttatagttatttcttttcaaatttgatgacaacattgtcattgggtccttctacccttcacatcagcaaattggacactaaagagactcggtcagaaacaaataactactaggggtacaataacacgagaggatttaacacttttggagtaggaaaatgtactttaagaaaagaaaattatatgtttatccatgaacactaagctctagacaaaaaaaaaaaaaccacgagaaatagtatataactctttagtggacaattggtgttgtacaaaattgaaatgatccagactaagtcaacaaactggtcttcttcattgaactcacagtgaaagcacagaatttattttcatctactagtttccttcccaattcccatgttttctaaaacataacacactacagaaccttctaataaattaaaacaaaaaaaccaatattttacatgtagcaccacaacctaacaatttctacctacaactttttctatagactataatataatctatctccactcattcattcatcaagattgagaaatggattcaaatgcttgtctaccacacttgctagtgttagcaataacattggtattggttagtcatgcaatgggagattcagctaaagacaaacagagatgtgcagaatccctgacaggtgttgcaacgtgtctgccatatttgggtgctgacgcgaaagcacccacagcagattgttgcagtggtctcacacaagccatgaagaccaacaataagtgtgtctgccttattctcaaagacagggatgatcctgaccttggcttaaagattaacatgacaattgctgttggtctcccttctctttgcaaaacacctgataatctctcacagtgttctggtacgttcaatttctaattaagccttcctttttcttaaagaacactacactacagtgttatgtttccatttcctatgcaatgaatgatctatcagtcttgttagttgtcatataacaacttatgattttacattcagttgatggaagttcccagaatggtagaaagcaggggacagatgaaacggccacagctaagaatagtgcatcttatatcgggaagagattgttagttgatagtgtaaaaaatatttatactcttgagtgtactaaatctctgacagactcacaatagatattattgcaaaaccttttggagatttatttttgtttttaatactaacctagagtctacagatcaaagttaattaattgctgaaaattatgttcattctcattcttggcgctgttagtccagtgtgaaaacggacaaattcagtttcatgttatatatggctctgtatatgaaaaggaaattaaagaaaaagtagaatttgattatggctaatttcacacattatatttattatcagaaaacctttagataaaaattatttttttgtacttttagcttggttgtaaacattaacattacatcacgcacacaaacatgaaaggcaaaccaaattattttacatccctgaattttatgaggaaggatgctataaatattaacaatacatctcacacacacaaagacaactaaaattatatcactaaattgaggtggggatagttttgaaaaaaaaaatagttggtgtggttgtgtaggtgtgtttttatgtttttcaattcaggatattaaatttacaaataattttatgtttttcaattagattttaacaataattaagaaataaatctaaatcattctacatttgtttataggtacttggcgaattggagatgctatatgggaatctaaattttgcttaacacaaatgtggtatatgcaaggaaaaatcaaattgaaaaatttttaaccaccacttcaaattttaaaagatttgtttcaaaataaggatatgaagaacaaattgtttttacagaacattccctccatgatgttttcctttccgttaggtgaaaaaaatagacatttccaaaaataatggaagtgaaccttatataatgctgtttatatagagaagtctttcaaaatacaagttaaagtactattactacaaactattttgtatcatatatctcttatatattttgatataaaacatttagtaattttttttatttcttagtagcatgtacatgaaagtcaatccaaaccgaatcgaggatttatgtggcatttaacttttatcactttctgccctcaaagatcacactctaatcatgtaccaacattttgtggtgtacaagaaaactcttctatttgagagcagacgatttttatttgaacctcttttggcaaatggaactagctttggattaccatgtgacaaaaaactacttaaataaggctctcaaatttgaagaaaaaaaagaagatagcaatgactacaaattgatcaatctgccaatacaatgataaaacattggtttattctaagcaacactaaaaagtgatactacatgagcaaaaagattgaaattattgaccatgcagtatgaatgtacagcattatttatttaatttttctaatacaattttattttatattaatacaaaaactctcacaaaaccacttcttaactactagttaattactacttttatacataaaaaaactagttaattactactgctacatagcagaaattccttaattcttcgagaattatattccttaatttcacgtggtttgcctcagttgtttgtcgctggtttcagtatatccttaggaatcatcgattgtcaaatcgttgttaaataacggcgctatatataattttagtattttgacgtttttaaatgaatttcttatttatgattatatatttacaatttttaatttcacttaaaaaaattgagtttctttcgatttacagagaaaaaaaagagtttttagttaacacactgttactatatagtgcggagacaattaccccacaagcttttcattaacttgtcataatataatatatgtgaatacaaactgtccctataatttaaaataaaataaataaaaagtcaataactttataagtattgtctccacacatatatattatcctataatttacaatttttatatttattattgatgatattcttaattaaccaagtaaaaatattttttttataatttttaagataattattataaatattaataaatttattacaaataacatttttatatgtgtaagtgcatgtatattatttattgaaatattttatttgaatttttcattaaaaatactaaatttattaacatgatatgtgcctcgttagagcagtgtttcaatttaatctgatagtgagaacagaattgacagcagattcaatttactgtgtgatgaaagagttgtacgaaatctttatgacatctacccccaacatgagtggcccagtggacaagcccatcaatctaacatgtcggttgatagcacttgcataaacttttgttccttgcatcatctcatgtgtctccattctccattctctgcttccactaacgattaaaccttattgattagggttcaatgatttttcaatgaataaaattaattttaaattcttgattctaacagctcacgtattgtctgttgaatcaaatggattaaactgttgatatcataaagaaaattaaaatttgattctttgtgtaaaataaagaaatctaattaattatgcttgttatgttactatatcatttttccggtgtggagtaacatcaaaatcaaagtaacaaagttacttgcatgttactctaaccataattccaactaagtcgaatatggtttcatgttttgtaaaacaatttagatcccctttgtaaaagtgtatctgtcttttacacaagtttattcactttattttatttcccccagaatcaattgttgtgttattcatattattgaattagtccgataactaccatgtcgatcattgttagttttattttcaccattgttcggagtaagtatatactattactttatgattaaacgtgttatttaaattgcagataaaaactctttataatgaagtacaattgtttataactacaacaattatattgagtcaatttaacactcatcaaaggcagaaaagctttactttaagattagacagaggctcataccaatcatggcggtggttataattacacacatcagcaactgtaaaagatcttgcacagccacagaaaaaaaaatgcttgatgcacatctgataaactcactcaaggtctatgtattaatagtgtaaaagagagactgaatattaaatgataaaaatataaaataattgttttgtattggcagagtacacatatatatgcccaaatgtagattcaaagttcaaacattttgggcctagatcatccctcctagtcatagccatctgaattggatcgaccccaccccaaggtttgtgttgcatcacttgcatgcattcacccaccacagttgttgttatagttttctcgtgatttttgtattggaaaatactatggacaaatataattgatacagtcataattaattattgtcatgttgcaattacaaagactcctcaaagaaaatgtttagtaaatcatgatcaagtagaaattgcaatggcaaactgttttttaaaatcttattagtcagttgtataaacccaaatttagttatatccaggtatgtaatatttgccattttagtgctctgtttggaaatttgcgtgtcgaattgttttttttatacgtacctacacaacactctttagccaaataccactgttcatggaggaatctgtcctgaaaggagtatagaaccagaaacaatatgcgtggtggtatctatcattctgaaaaagagaaaaagtgggatacgtacaatagtaggactgtgacactactagaaaaatctatgcacctttcatgtccctaaatttatgaacaaaagattcaggtatcgtttattgaatttgttttatatggagtgtaaagtcatcatatccaatactaataagtgtatgtttatataattctttttaaaataattactcttctttattttcatctattaaaaatgttatcacattaatttttaaaataagctaaatgaagcatgtttcataagaaattaacttttactgtaattgttacattttttagtaacaaagggagatgggtgaagacggtgaaggaaaaaaaaatgaagataatgtctatgttgttcaaataacagtattaattatattaaaatagttaatatcaaaaaatatattagtaaatataacattgttgtgttggtgctatttattgtgcatcaaaatatgtaaaaataataattaacttgtaatttgtatagttggtatgggttgttttatctatcctcctggattttgttgtatcacacatataatcatttatatatatatgggctactattgtcactacaaaaaatgccattgagactaccaaagcatttgaaattacttggttatccttagttccatttccccacacctcctatccttcccctctttacgttcagctactctccctctttacatccaaaaacagaatttaaataaggctctcaaatttgaaaaaaaaaaaagaagatagcaatgactacaaattgatcaacctgccaatacaatgataaaacttcggagtattctaagcaacactaaacagtgatactacctaagcgaaaagattgaagtttgaaccacacatgatcaaggaaatgaaaataggcataccgccatgatctacaaatcagcaaaggagcaatcactatccagaatcccacaataaatccaattgtcatactgacaaaaaaccaattcactccatgcccatgacttccttcataactatgggttttcccattggagctgcagtttatgggcagtggtggaccacatagattgttgccgatgaagctggaggcatcaaaagtttgcaattgagttcctgttggaatatttcccttcaaatgattgtaagacaagtctagcatgctcagaaagctcaaatttgcaatggttggagggatttcaccagaaagttgattcctcgaaaaatcaacggactgtaaagatcccatattaccaatgccttgtggaatatgaccaatcacttggttgtgggataagttcaaaaagttcaatccatttagacttgtgatttctcgaggtatttctcctaataatttgttacttgacagatcaatgcttgttaccaaacccagaatgtttcggtactcatcttctcttcctttcagccatagtagcacaataactaaactttccatcgaagagtaaaacgtaccataatgtccttgagaatagatacgaggatctgtactttggttctttagtgtcatggcactcaagttactgaaacagctcggtatattgccagacagattgttttgtgcaaggtctaaaacctgaagatgactcatctgacatatttcatttggaatgtggccgccaaatctgtttgatcgaaggcggaggattttcacatttaagagcttttctccaacccatgttggaatagttcctgaaagattattttccccaaggtccaaggatatcaattggttattcttcttcacactggttggaaatatccctgagagtgtgttgttacgaatttgtaaagactgcaggtctgccaaggaacccatggattggggtaagttcccaacaaaatggttgctttgtaaatttacatccacaagagatgtccaattcatccagcaatcaggtatctctcctgacaaattatttgatgcaagattcagaaattgtaattgcattggcttgtcctgatcgttacataaaaagtcattcatggattcagagagtgaattgcttgaaagatctaactgaagcacatcacttgaaagatagggtaatttaccacacaagtgatttgagcttagatcaatagttgggatagatattggattctttaatgtagtcccaatctcaccatggatatgattacgagagaggtttaaatacaaaacctgagaaagtgcttcccacatctgtgtgggaatagaatcgaaaatccccgtgttagatagtccaacataatgaagttggttttgtgactgaatccacaatggaaagctgggacctaactgccatgatgtcacttccaaataggtaagttgaaaattaggaatccaattgggacccacttttaaagtgaaattgtttcctgatgcatgaatctccgtcaagcttgtaagatttgcaagatcatcttccttgacaactccgtgaaaaagattgccgtcaatatgaagagataacaatttagagagtgatcgaagacttgcaaatggatttccactgaatttattcatagagagatcgagatatcttaatgatgaaagttttccaaatgatctaggaagagcaccaccaattgagttgttgaaaaaatctagcagctcaatatttttaaatgccccaatatgatctgtcagattgcctgaaagtcgtgaactctgaactgcaagtgttgtgagtccatgggaaatacaaggagcaagaatttctaaaagttcattaacctgttggttgagtttgagatatgataaatctatcacccttaagttgcagagattacccaaagaagttggaatggttccttcaagttgattacctgataaatcaagttcaacaagagaagtcaaatttcccagggcatcagaaatagtcccatgcaagttgttgtcccctagattgaggaacttgagacgatgaagaccgtataagcaattagttatagaagatgaaaatgaattgaaagacaagtcaagattttgaagatgtgtgaggtttcgaataccacaaggaatcggaccttggatttcataattatctgataattgaagagaaacaagattcttcaatttgaatatccacttggggacaaaagaaatggcaggggaataactagtgaaggaaagatggagagtttgcagagatgagaagttgagcaaggatggttcattatagtgagggagtttgcatcctgacaaagataggtgggtcaaagaaggaagagattggagagtgtgtagccaatgaaatgctttggataggtttgcattactcaaatcaagatattcaagcttccacatacttgatacccattctacattttcagctaacagaggctcctcgaaccagcttccgaggtgaaggtagaccaaattggagagattcccaatctgagatggaatcttccccatgaatccagcataagagaggtcgaggtgagtcaagagaggtcattgcacaaaggaaagaaggaattgccataccttcaaaatccacgtaggccaagtcaagatatcgaagcttagagagattcccgatctgagagggtactgttccgttggcaacaacagaactcaggtcaagatacaccaaatttgagagattcccaatctgaggaggaatcttcccatagaatccagtaagagagaggttgaggtgagtcaaggaagtcattgtcccaaggaaagaaggaattgacataccttctccaagatatgtattgccgctcaagtccaagtaatttaaatgctttaaatcagccaaacaaggacttatctctccaccaaagctccatctcctaaaagcttcccaatcatcgaaagaagcaggaggtgtagtgtggaggtgaagctgaagaagatgggaagtaaggttgtggcagaggactccataccagtggcaacagttggtattattaggattccaagaccaaagcctattggaaggatctatgagattattcttaaacttgaaaagtgtctcacgctcacttgggatgcacacactctctctgcatggtaagctcaacaaccaaagctggacaaagacaagaatataaatggaggaggaattcatgatcatgcaacgcaaatacagaaaacaagtgtagttgttggttctgcatataaatcatcaaacttctattatttatactgctgccctgcctgtttttttttcttcactttcattattttttaccttttttattattgtgccaaatactaaaatacttttttaatattttaattcacttcttagaacggtttcctttatactgatgaaagtgtctttctttttttttttttttgacgtttctttttttaattattgactttattatccaattctccgacttaattcttagaataggaaataattattttattaaaatcaataaaatttattgtatttcttggtttcttcaaaataacttttaaaggacaaaatattctaattaaaaacaagaatttgatcaaatggaataaaatgacatattttttaaaaatttctcaattaaaaaataaaaagactaaaattacaagattttttaaaaataagagataaaatatttcaattaaaaaataaaaaactaaaataacatattaaaaaaagacgacaattatattttaagcctttttttcactttcattatttttttacgtttttttattattgtgactaatactaaaatatttttttaacattttaattcacttctttttttacgctggcttttttaaattatcgacttaattatccaattctcccgaattaattcttagaatacgaaaaatttatgcatttactgtatctatctctttttttaaaattcctatggacactaaattcataaaaaaattaataacaaagaaatatgatttattcttgtgctcaatactaaaataaataacattctttttggtacagctttttttttttttacaaaaataaataagaatcactttattttaatttaccctatagaactacttaaatgaaaatttggtatcattaaactttgaattttaactattatttagtcaatcctttcgttaaacttttgttacgaaaacagtaaaagtccaacatttaaaaaaaaatcaagtcttctatttcatgatattccaacccataattaatattaaattatcaaattttcaatattcaaactaaaaataatgtaaaagaaaatttgtcttctaaaccaaagctcacaccatcaagtccatctcaaggttttccatttgttgatcttgaacctttggacactccacaaagtccagccatgttatggtctgacttcttcaactttaaacatagtcactccattaccttcatatcaagttcggtcattgacaacaattattgcgagttaagtcaagcaaggaaaaaaaatataattggttaataaatcaattatagaaaaagggtgtactttaaagaccaattcagtttaaaaaaatctagataaaaaaaagattatctcgttccaatctagctatttaattttgatcaacttttcaattcacaaaacaatattctcttatatatgaaaaaagactaaatttaattgtcatcaattggaaaggttgttgtatcatgtatttctaattgtatttaaatttgaatattattttctttatcatataaaaattacttagttatataaaaagaagtgtgaaaaagaatattaactttttttctaaaaaaatcggtattgtattttgtattttttacaagatatcaacttaaataagaggagaaacataattttaatttccatttcactttttaaataattgcaagtgtcaaatttaaaatatcataaaaatactcacgttcaatttaatattctaaaaaaaaaacaaattcatacaataacttaaacaatctatagagaaatataatttattcttgtgccaaatactaaaataagaaacaatttttattttaatttaccgtatataattacttaaatcaatgaaaaatttatcttaagaaaatattaataatttttttaatctttgagtaatttacatcaaaggtaattaaatttagtttaattcgtcttcaaattttaactattatttaaatcagttcttttgttacacctgtgttgagtatataacaaaaagtctggcattataaaattcaaatattctattacttgcaatttgaacccataattaattttaaactatcaaatttttattattcaaaataaaagaaatgaaaacaaggttttctcctagagaaaccgctggccactccaccaaatccatatcaaggtccccacttttccaacttgaaccatagactactccatcaaatccatgtcaacttgaaccatagactactccatcaaatccatgtcaaggtcctccatttttttatcataaaaattagtatcatattttttattttctttacaagttgtcagcttaaataataggagcagcataattttaatttccattttactttttaaataattttaagtgccaaatttaagcaatcataaaaatactcacttcaatataatattcttaaaaaataattcatacgataacttaaataatctacaaagaaatgtaatttattcttgtgccaaatactaaaataagaaagattttattttcttagtttaacttatagaattgcttaaattaatgaaaattttattttaagtaaatattaatatttttataaaaaacattaatagtttacaataaaggtaataaaatttggtttaataatgagtcttcaaatttaaccattaattaaatcaatcctttcattacacgtgtgttaagtaaacaacaaaaagtcttgcattattaaattcaaggcttctattacatgcaatttgaaattataattaattttaaattaacaaatttttattattcaaaataaaataaaagaaaaaaaaatatcttctagacaaaccgtagacaactccaccaaatccatatcaaggccccactttttcaacaggaaccataggtcactccatcaaatccatgtcaaagttttttatgactgacaacaaatgttgagagttatttcaagcattaaaaaaaaatagactaaaatatatcattttcgttcctataaaattttaatatgttactttttcttatcctaagttaattttggatgaccgataattatcatgtattctttaatttttgtgtcattttaggacatttatgtgatgtatatctcatgtttttttattgtcatgaactaatcttctcttagagtttaatgtaattgtttcttcttccatgtaatagctactttttttttattcaataaaacattgtaattgtttctcttttatgcctaatatgtgtttttggattgcacctgtttgcatgatttttcattcaattgtaatagaaaaattccattaagttgcgaattggatagaacacccaataatttttatgtgtagggatagttgagcatcaataaacactttgtcttaatgcaaattgtttgattatgctaatccaaaggattgatagtttaatcaagagatttagctctcttcacttaagaaattaaagttaagacaatatggtaggtttatgataatataatctttattaaatataaatgtgtagcgattacgtgataggaactccaataaaattaaacccgaacaattttttcattgatttaatctcaatttactttgcatacacgagtgtttgttaaaattctcaaacaaaaaattttcccttaattttttcttttatttccttccttaattttctttatctttatgcatattgttatttagatgaatttagctaatcttaattaatttcaaatattcatagtgtaaaaatttctttatctttattcatagtgtagaaatattggtaggaacccaactatgatctcaatcgcaaccggtcataaaacccaacgactgtgatctccgctgccaccaccgctgcaaaacccaatgagccccaactcacgacaaacctcattgtgaaatcccacatgaaatccaaatgtgaatccagccatgaaacctagtgaagccaaccaaacagttgttcttttctcgattttgtggtttaatgttttgatattaagattttgttggttcatatctattctttcatctattttgttttcatttagtccaaccaccgggggaaaaatgaaacaccatcagtggcacagtagtgggatatgaggaagatgaagggtgatgaagagatagataagagagagaagaaatgggcaatacaacattgtttttattttaaaaaaactttttcccacgtataatctgttaattgatatgcttatgtaatttaaatatgtttaaatcacatagcaattatctaattttcctctcttttattgcttattttgtgttagaacattagaaatttaacttcttttgagtttttgtccaataaatgctaaagctatcaaatttatagtattttttagtgtatttttttttatagaattacatagtaggaggtctgtaatatggttgaagaactggagcagctcacccagcgcgtcaacaaccgctcaacgcgaggagccaacttggaggtcaagcttagcgcgcatacgatgacttagtgcgcatctacggcttagtacgcatctgcagtttagcctgcaccttgcggcttaacgcacattcacttatgtcagatggactttgcatgtgcacttcgcgcgagcacatgctggcttagcacacgatcaatatcacaaaacatgattgtgcttcattttaaaggaaaaaaaaggaaaaagtaagcaattctttagggggacgaaaattgagaactaagacacgagagaagagagaaaatccattcacttgggaccctttcctccattttctttcacacctcttgctttctttttgtattagtaaccctctcatgacaatgagaggctaaatcatccattgttgggagttcaactatcaaacactcttgatgtaatgattctaactatttatttaatgttatttaatattattgtcttttctgtgcttaatatcatgtttatagctttattacctattctcatgtagtgttatagggtttatgcattggaaaatgtttatttcctatgaacatctaggtaatcagtgtctaggaatagaatgatattattttgccttatttattatacatctttattcttaaagaaaattatttgatatagctcttaagggattagaagtgaaattaggtaatttaaactctttcacaagagaaatcatgattagagaaatcatgattagggtatgttagtggatgaaggtaataatcaaaataacgtagtaaaaaacccttaatgttgcatcaagagtagttttgataggttgagtctcaacatattctgtaatcctacttcaactgacaacccactcctgagtgtttgtattctatctctttaatgtactatgcttaattatcttcatttatgtcaaattttatattctgtatcattatttgacaaatatcaattttaatttattgattacttaaaattgaacatatacaaactcagggtacagttaaagtccttgtaaactcgacactcgatcttactgttttatatacgaaaatttatcaggaacaataagcaggtaaaaaatatgctttttaacccacaatatgaaggtaaacatgcggtcgaaatgtatatacttattttattcaaaaaacaaacatttggatagcatacatacacgaattcatgaaaccaaaaattaaataaaaaaagctaaacataacaacaaatgaacgagagaaacgaaaaaaaaacaaacaaacaaacctaatcttatagagcgcaaaaagaacaacgacctgaacttatagcatcataatcatccattgaaaaaattgcgaaaaaacaatctttgtatgggttttccttcacagaattctcctttttttctccgtccccctccttgtatgctagtgcatctcttcttttaaaatccaacaacaacttaggattccattataccacgatctccttgtctttagacttacaacttcaatgacgttatcttttactaatattttattttttgctcaattgaatcaccattactccagttttctgatgatcaattttgtaactttcagatcttctatggtttttctatttctctctccaaaatattttaattatttttatttagaagaatcttctataatttttctttttttctttttctcaaaaatattttaaatgatcttatcttttagtaatattttttttctcaattgaatcaccattactccagttttctgatgccaagtcttcttgtaactgtcaaatcttctataatttttctcttttctttttctcaaaaatattttaaatatttttatataaaacataaaaataaacccgaataaaattggatatttacataaacattaaaaaaaacacaaataaactgtgacttgaacatcctaactttcttccaacaaagaactagacacacagatattgaaacagcttttaagaaaatctacacaatcacccaaagcaaagactccttcaaagcacttcttcaattagatgactcctgcagccttctttcacctgctgcaccttggttaacttgttccacttctgcccttcctgcctcataattcatagatgaatcttcgacccatgcaaaccacaaattcaaaattaatgtggcactttgcctaagtaaaaaatagcatacccaaaataaagtaaaaaaaaaaaaaattgtaactcatcttggactgaagtctaaaaccactaggataaaaaatactccacttttttttaaacagttcttacaaaatgaaaaaaaaaaaaacatatagaaaaatatgtaagcatgaccaaaacaagtaaacaaataactgcgattcatcttggaatcaagtcttaagactaacagaaacatacataatcataatttcgtttgtttctcaaaacacttcttccaagataagaaaatcgaaaaactgtcacaagacaaatataatagacaaacagagagaaaataaattttaatatcgatagaaaatatgtttgtctaactgcaaaacaagaagaatgtgaagagtaacaaaagaattagtcagagaagtatggtaaaacaatataatcaactaatttagaaataagtaaaatttgcaaaaagcagtgatcaaactagagaaacctcatggagacaactagagttactattcattgttatttaccttgtgacgattgattctctgctgggttggtaaaccatgtcccaaccatacctttaagcttatcaaccacacctttccccggactattcacatacatctcttggtactttttctctgtcaccacactttcacctcctaaccttctcttcacttcctctgactcagttacctttcccagtattctttgatgttccattcttctctcaggatcatcctctctcttatgcacagcatcagaaaccacctttctcacaccttcttcagtaacttccactgggggcagttccttcttgtgcagagtctctgatatcacttcagagagagccctgtcttcatcaccaggcctcagtttgtccaccaaatagtccttcacagaaacccccttgtcctgttccacacccacactactagtttgagttccagaaactttggacttcacaccacttcctacaccagcaacttttccagaaactggagctagtttctctgtcagagactgagcaacactttttccatattctgtaggagcagcagcatggtcagttctcttctcttgtggtgttgttgttgctgtgtcgccaaaaccaagcttcgaagctacggtgtttttggctgagaaagctttatcagctattgcagaggttgctgattgagtggtttgagttgtttttgtttcagtgttgttgccatatccgagctttgaagctacggtgttttttgctgacacggctttatcagctattgcaagctgttgctaaagagattgttgatggttgtgtgttctcttgatggcttgcttgagttgtttcggtgttgttgacaccgtatccgagcttggaagagactgtgtttttggctgacatggctttatcagctattgcagaggttgctgaagagattgttgatggttttgcactgcctgtgttctcttggtgatcccttgatcgagttgtttcggtgtcagcgtcatatacaagcttcgaagtgacagtgcttttggctgaggttgctgatgagattgttaacggttttcattgcttgtgttctcttctttatgcttcgtttgagttgtttcggtggtgtcatcactgtatccgagctttgaagctacaacatttttggcagtgatggctttgtcagctattactgtggttgctgaggagattttatctgtgtaactgctctcgtttgatggttcttagtgtggctcctcaacttgggtggtggtgtaggtttgtggggtattggtttgagttggatattctggtagaaattgatcatgacttccagctgaagcacaaagagtatgtgttgaatttgtaccaaattgttgtggcaagtgttggtcatggatttttgttgaagtgtgctgaatgttaggttcagtagagaaagataattctggtgttaactgtattgaaatttggaaggaacacatgtggagagtcaaatgacagatttgtccccgacatatattgcaaaattttggatttctctttcccaactctttaccatttgccactttccagctttgactcccgctcgactcgagtgtgtctttctcactcacttttcttttctttttaaccttttttcttttttgaataatgataataaccaagtattagtctttaatttataaaaacaaaatacataaaactagttttaattcgatgttaataaccaataagtccttaactcattagtttgagtggttctgaattcatcctctaaaaaaaaaaaaattcaagtcttctatttcatgatacctcaacgcataattaatattaaattatcaaatttgcaatattcaaattaaaaataatgtaaaacaaaattttcttctaaacgaaccatagcccactccatcaagtccatctcaaggtcctccattttttcatcttgaaccctttggacactccacaaagtcctgccatgttcatgtcttggtcctccccaagacattattatttaattattagaccacaagttttcatatattttattactttattctttatgtaattttatactttttaactattttatcatataattttacaacatgtatgattaaaaaagataattttcagctatcaactatttttttttagttgtactaaacatagtgatatcactatgtttaccaataccttgtggaatatgaccgatcaattggttgtgggacaagtttaaaagatccaatccatttagatctggtatttctcttggtatttcccctaataatttgttacttgacagatcaatgtttgttaattaccaaacccagaaaatttctgtactcatctgctcttcctttcagccaaagtagcactaaactttgcatttatttttaatgtgttcttttgtgcattcagttgaaggaagttcacagaatggtagaaaccaggggacagatgaaacggccacaactaagaatagagaatcttatatcgggaagagattgttagaaagtttggttgcagttgcagggcttctaatttggcttccatgagcttaactcaattactacctatatattaccatttttatatcacgttgaaatgtaaaccattgatgagttgatagtgtaaaaaatatttacactcttgagtgtattaaatgtctgacagactcacaatagatattattgcaaaaccttattggagatttatttttgtgagcattttgcctttaatctcatacaactatatgcttgttacacaaatcttattgttcagtcctaaaagtcttttatctctaataagtaataacgacttgttgtaatagaaattaaaatcttattatttttttaagtacacttgagaatgattttggtatcccacttttcaattgctcggttcgtttccatattttcaaattttacaaatttgattcattagttaacttaattgatatcaaattttacattttggtatccatatttacaaaattaacaaactaattttttttcctcgtaaagtctaaaactgataattcgtcaagcatgatatggtttctttagccaagtacaagataatctagattctacttgtatcctcccaagatattctaagaatgaatgagttaagttgaacatggaaaaacaaatattcattaagatgttatggtttgattatcccaacaacttttctcccatgattcaacttgttgaattgagctttcctttctctgtaatgttgcatacaaagttggagggtcaaaaggggcaggcatggtgcaagggtcggtatttgcaggaaccttgaccaatgattccatcataaatttctttactgatccttctgctccacaaaccattgactccacacatagttctgtagcattagcacttatggagggtttgtatctgaagatgaaacatgtagtcgtacacgtagtccatctttatgttacgtgcaggggttgttgctgaactttgagggtcagcaccttcaaaaaatcaagaaggaagaagaagaacaattcaaggtaagggcaatattcttttccataatctgaattacacccaccaccatatatatagagaacttggctgatatactagaatattcttataacagaaatcctaacaaattactagtgctaataggagtggtggcagacatgtttggtacaatcactaccctcatgccagatggacactcctgcttctttctcatgtacgtccttcttgcttcttcctcacgtacgttcttcttcctatcactttacctcttcttgaatgccaccttgccaatttgatgtgcctgataaatttcacaaatagaaatgaaatgggacaagttaaacattgatttgcttataactatgtagtcaggtttgaccctgattattattaagtgattcaccattaaatcaaatattctgaggtgaattctttaattttaggattaattaacttggtaagaattatattctagccttagtgaagaagcaaaacttcaaaattaccctttgcttgtgattattgccccaatccacagcaaacttaatggatctgcacttgtcatcgtcctttatgggccaatagtggtgcactggaatcagtcctctcgtgaaaaaatcatagtatttaggttttacaagtagagtggtagagtcacatgacagaatgtatttttgactgactgaccaagcagaaccttcaatgtacaccttatatctgcacgatcttgattgaattaaaacatttatttattgataaactgaacatatgtatccaataacaaaaatatagtattatatataattataactgaagcatgaatggacagtttgaatgttatacctataagtgcattgacttggcaagtctgatttgttgaacccctcttgtgattctcgcaaccaatcctgaaacaaaattttcatttgtcaagaaggaagctatatatgtggctttattgtgagtcaattaacagacaaaatatattgtccagcaggaaaaaatcagtaatgttcaataacaggttatttcctttgattttgaatgtacttttaagttgtgtattaataaaagattaaaagttaaaaaagtgtataatgttatacacaatattgctactggattgtgttgcttgaatttgcctgttatttctagtttctgcacaccatgtgcttaagccaattttatataatgaaacttttgcttataagaaatattacatacaaaattaattttttcatatccaaataataaaactactttcaataagtgtaatcaaacaaagctaataagaagtgtgatacctgggccaataaacgagcattccaatcttgattttcagaaacattgcatttcatgagatattatctggtttcagcaacagctggattacctttccagtaagcataaggctctctgttcagccatggtatcctcgtagtgccttctttcaactctcccaacaaaatatgccatggctttatattaatctctgccctgtgcagcacacgtgcaatactttttacttgtttaaaaattaaggtcccgttagtgctgattgtgaattttcaattttccgttttaaaatataatttcaaaatacaaacatgttcaacaaaaattgcactaagttaattttttacattatggattatctaattcaaaatttacaagaagaataggcagatggagatatatattattgaagtgtaggaagaagaaaaaaggagtgaagttggcttagtacgtagcttaccatccccaaaaggaccaatcaaggaagacaacgtccaaggtagcatcatttccacaataccgaaacaagggaggtggttgctcaacattagggccattgtaacgatcagaaaaaccacaggccaatccacacaatcaaacataagctccaaatcaggtatcttgccagggtaccttctcaacaattgtagaatcccccatatgctaaaaacatcccttgtttgatagggccttgagtaagtctccaaataagccctaccctttaatattatgaacctgagatttgcagaagttataaaattgacttgataaaagaaaaacaaaaaaacactgatgagtttgaatcttttttttttcactaacaaaaactaatattaaatatttaaattgtaggtttgtggggcatgttccgtgcgggcccatggcctcaaatcctcgtggatccaacggaagtaatctggacacgtggcggtggctggacttctctgatggtcttgtaggtttgtggggcatgttccggtgaggttgtatgcggtgcagttcaacggtgctattggcttccggatggagactgcgaaaggactcgtggtgctttgtgctgatttggaagatgatgcaccggaaaacatacgctacatgtacaccacgtgtcacacaatgaccacaaatattcaaacaaaccatgcatgcatcatcaaataaaaacaacacccacgtagctccagagtttaactagaaaaacgtatatacactgctgtaatttgcatgggaacgtaattaagctttgaaatggttaaaattaagaagctagagagaagtgagaacaaaacagaagtaccgttaaaatagcattatttaatgaataatgtaagggtacaacagtgacaaaattatgggtccaagataattctacgtgcatgaaactacaagatagttagaaggacatgtgatttacaaagacttgttacaactcacaacctttggaatttctctatgcctggttaacccacaatttcggcgcctgttgcggttaggaacataggctagcaaaaacactaatcattttgttaacacacttttctaatatattattttttattttaaaatttatcaaaataaaaaattcagctgatctcaaattttatttagcaaatttttctcatatattaagtcttaggtttttaaaattataaagctaaaactaaaacgttttactaaatgtattttaaagtaaattttatacacaaaaatattatgattttataaaaatattacttcaaataaaaagtcttataatttaatactaatttccaactatataaaaaatttaaaatgtaatgttgaatcttgcctgagtcgtccgacaataaaaaaacttgaatccttattcaattgtcttcaagttttagtcaaattgtttggtcaaagggagacatattgagccctcctaactataagctaccctgagggtttctatcttttttttcccacttaatttttgactttggcagcaagggttaaacctaccacatctacatgactatgtcttactttccaataagttacacctaaatagctaacatattcctcttgctcacgcacactatctttcgtaaacttttcacgatcatctttatattatcaaattcatttaattaatatacaattatcttaatattataagcaagtctctgtataatcatgtagtgtttctaaattgaatgagtctaaatcacacactcctgaaaaaaaaggtcatattgtcaaaatatccgtaaaaagatagaaatactatgttatgggcaagattttgatatactataaccttaatttttacaataaacctgaatgtctaaatatcataacactgaatatatttgtcggtagcaacttactgcgtgccactttaacttgtgaataattaatgggtaaaagagtaagcgagaaacgtttttaatggccacacgaatatagttggctaagcgacgaaatgacaatgtgttaattttgtcgtgtcctcaaccatgtgtatgcctcaggccgagggaattctcacacaccattcctaacaatttctaaggaattccacaacgtgtctatgcttcagacagcaataacgtacgaaataaacaagtagcatctaataacgttaaaataagcacacacatatatcgagccaaccaatgttggaggtagaagaacaacaataatatcaatatttaatttcatttagtgttaatttattaggatctcaacataaaataacaatttattagaaaacaaacataaaatttgagtatttattaaggataaaaacatatttaatttcatttagtgtttaatagtgttttggtctatgttttttttttgtttttttatagttatttcttttcaaatttgatgacaacattgtcattgggtccttctacccttcacatcagcaaattggacactaaagagactcggtcagaaacaaataactactacgggtacaataacatgagaggatttaacacttttggagtaggaaaaattattgaccatgcagtggcccagtggacaagcccatcaatccaacatgtcggttgatagcacttgcataaacttttgttccttgcatcatctcatgtgtctccattctccattctctgcttccactaacgattaaacctcattgattagggttcaatgatttttcaatgaataaaattaatgttaaattcttgattctaacagctcacgtatagtctgttgaatcaaatggattagactcttgatattataaagtatatattacaacatataacaaaattaaaaattgattctttgtgtaaaataaagaaatctaattaattatgcttgttatgttactatatcatttttctggtgtggagtaacatcaaaatcaaagtaacaaagttacttgcatgttactctaaccataattccagctaagtcgaatatggtttcatgttttgttaaacaatttagattcccttatcaaagtgtatctgtcttttacacaagtttttttactttattttatttctcccataatcaattgttgtgttattcataatattaaattattagtccgataactatcatgtcgatcattgttagttttgtttccaccattgttcggagtacgtatatactatttactttacgattaaacgtgttatttaaattgcagataaaaactctttataatgaagtacaattgtttatatctacaacaattatattgagtcaattaaacactcatcaaaggcagaaaagctttactttaacattagatagaggctcataccaatcatggcggtggttataattacacacatcagcaactgtaaaagatcttgcacggccacagaaaaaaaaatgcttgatgcacatctgataaactcactcaaggtatatgtattaatagtttaaaagagagactgaatattaaatgataaaaatataaaataattgttttgttttggaagagtacacatatatatgcccaaatattgtagattcaaagttcaaacattttgggcctatagctagaccatcctcctagtcatagccatctgaattggatcgaccccaccccaaggtttgtgttgcatcacctgcatgctttcacctacttttagaacgtcaatgtagcttttaaactatggccacagtagttgttatagttttctcgtgactttctgtattggaaaatactagggacagatataattgatacaggcataattaattattgtcatgttgcaattacgaagactcctcaaagaatatgtttagtaaatcatgatcaagtagaaattgcaatggcaaactgttttttaaaatcttattagtcagtggtagatcacccgcgtttaaacccaaatttagttatatcctggtatgtaatattttccatttaatttagtgctctgtttggaaatttgcgtgtcgaattgttttttatacgtacctacccaacactctttggccaaataccactgttcatggaggaatctgtcctgaaaggagtatagaaccagaaacaataagcgtggtggtatctatcattctgaaaaggagaaaaaagccggatacgtacaatagtaggactgtgacactactagaaaaatctatgcacctttcatgtaatgtccctaaatttatgaacaaaagattcaggtgtcgtttattgaatttgttttacatggagtgtaaagtcatatccaatactaagtgtatgtttatataattcattttagaataaatactcttctttatttacaactgataaaaatgttattacattaatttttaaaataagctaaatgaagcatgtttcttaagaaattaacttttactgtaattgttacattttttataacaaagaaagatgggtgaagacggtgaaggaaagaaaatgaagataatgtctatgttgttcaaataacagtattaattgtattaaaatagttaatattaaaaaatatattagtaaatataacattgttgtgttggtgctatttattgtacatcaaaatatgtaaaaataataattaacttaattgtaatttgtataattggtatgggttattgttttatctatcctggattttgttgtatcacacatataatcacttatatatggggctactattgtcctttgcagttgtgtgttgcggtcatgattcttttctttttagtcatttttccatttctggttaaggaaggtaaagagagtgagatgccaccaccatggaagttgcttgagctattcagatgatgacgactccactttttcctttgagtcagattgctgcacagtgtagagatggcattgcgccacgagtggcagagatttgtgtgacgcttgctgaaaatgaaagaagtggggaggggatgtgcaagttaagggagcaagaagaaagactggaaagggatggagggtgacaatggtctaaatggaaacatggttttgtttattaaaatatacacggaataaaggggttgtaaaataattaaattgaaacgaaatcaagattatattgggtgtatattcaataattaaaataaaatccttttctcattaccttgttttgcactcctttattataacaataatagaattgtatctcggtttcattttactttacatcccttttattataataaagaaaatacagttttgtagtaaaaaaattatgtccccaacaatgtcacaaaaatatgatgtataacaaaattatatttccataaaaaaaatacttctgaaatttcctaattttctacccacatgggtattgtgaataacattgatggcacgcagtgataattgtaactccacttatatatttatataaaatcctgctctgtacgataaacaaattttgaaatttttcacccataaatggtgtccttcagatgtccacacataggtccttctagacttgaatgacaaattgaaaggtaccaaaaaaaaaaggttatgatataataataacatgctaaaaggttaatttgtgtattgtgaattattgattttgtttattatacatcctttttcttcttttttgtcaaaattttaattatttagcagttttacgctgacaaaatatttgtaataccttaaaattttatcacatgatttttaggtcataacccaagtgagaaatcatatgattattacatcgtttaacagtgtttttttttatgaaagtgactaagcaatgacaaacagaaatatagattaagaccacccaaaagataattgagatactaataataaaattcgtagaaggatgaagaactaaaagttgataaaattcaaattcttaaccattcatttaaagagttataatctatcactctattcagaccaatcagtactaaagaacaatttatatatattaaccaaaaataatgaaagctggctacactggttttcaatgggaagagtccgagagaccacttccagcattaaaattttgtacaaaacagaatacataaattaatgacacattccatattggtgtgtagcgcaacatccttattacaaactaaacacgcattaagcatcaaaatacacccatttaaattatttcttgcaagcattaagaaaaatactactacttagtattgcgggaatggagcaacggcaggttcatctgagagctccacagcatcaaaaggtgctggagccaccatacctgagcttttgatctcacccatttgtcgacgagcatttgcacaatttgggaagaaacacacctgtgcatacatgaaagacaaaacttataatttattagacaatttataatcatatattattttgtgtattcagttctgaaaatgttttttagatgcgtattcataaaagataaaaataaatacaaaacaaaagtaactacatacaatattagatcaatttgtttttgttacaatataattcatgcattcaatgataaaaattagaattatttttagttaattagcaatgtaaaaattgatgttgtgttatagttttttatttttaaatcacaagtatttttttattaaagataatctatcatgttcaatagaaatagaattatatagatgatagttttgtatatatatataaatatttaatgcaattatataattaaaaaatgaaggaaaaaaaatgaagataatgtctatgttgttcaaataacagtattaattgttatttgaacagaatttaaataaggctcttaaatttgaaaaaaagaagaagatagcaatgactacaaattgatcaacctgccaatacaatgataaaacatcggagtattctaagcaacactaaacagtgataatacctgagcgaaaagattgaagtttgaaccacacatgatcaaggaaatgaaaataggcataccgccatgatctacaaatcagcaaaggagcaatcactatccagaatcccacaataaatccaattgtcatactgacaaaaaaccaattcactccatgcccatgacttccttcataactatgggttttcccattggagctgcagtttatgggcagtggtggaccacatagattattgccgatgaagctggaggcatcaaaggtttgcaattgagttcctgttggaatatttcccttcaaatgattgtaagacaagtctagcatgctcagaaagctcaaatttgcaatggttggagggatttcaccagaaagttgattcctcgaaaaatcaatggactgtaatgatctcatattacctataccttgtggaatatgaccaatcaattggttgtgggacatgtttaaaaaattcaatccatttagatatgtgatttctcttggtatttcccctaataacttgttacttgacagatcaatgcttgttaccaaacccagaatgtttccgtactcatctcctcttcctttcagccatagtagcacactaactatactttgcatggaagagtaatacttaccatattgtacttgagaatagatacgaggatctgtactttggttctttagtgtcatggcactcaagttactgaaacagctcggtatattgccagacagattgttttgtgcaaggtctaaaacctgaagatgactcatctgacatatttcatttggaatgtggccgccaaatctgtttgatcgaaggcggaggattttcacatttaagagcttttctccaacccatgttggaatagttcctgaaagattattttccccaaggtccaaggatatcaattggttattcttcttcacactggttggaaatatccctgagagtgtgttgttacgaatttgtaaagactgcaggtctgccaaggaacccatggattggggtaagttcccaacaaaatggttgctttgtaaatttacatccacaagagatgtccaattcatccagcaatcaggtatctctcctgacaaattatttgatgcaagattcagaaattgtaattgcattggcttgtcctgatcgttacataaaaagtcattcatggattcagagaatgaattgcttgaaagatctaacccaagcacatcacttgaaagatagggtaatttaccacacaagtgatttgagcttagatcaatagttgggatagatattggattctttaatgtagtcccaatctcaccatggatatgattacgagagaggtttaaatacaaaacctgagaaagtgcttcccacatctgtgtgggaatagaatcgaaaatccccgtgttagatagtccaacatagttaagtttgttttgtgactgaatccacaatggaaagctgggacctaattgccatgatgtcacttccaaataggtaagttgaaaattaggaagccatttgggaccaacttttaaagtgaaactgttccccgatgcgacaaaccccatcaagcttgtaaaatttgcaagatcatcttccttgacaactccgtgaaaaagattgccgccaatatgaagagatgacaatttagagagtgatcgaagactttcaaatggatttccactgaatttattaatagacagatcgaggtgtctaaatgatgaaagttttccaaatgatctaggaagagcaccaccaattgagttgttgaaaaaatctagccgctcaatatttttaaatgccccaatatgatctgtcagattgcctgaaagtcgtgaactccgaactgcaagtgttgtgagtccatgggaaatacaaggagcaagaatttctaaaagttcattaacctgttggttgagtttgagatatgataaatctatcacccttaagttgcagagattacccaaagaagttggaatggttccttcaagttgattacctgataaatcaagttcaacaagagaagtcaaatttcccaaagaagttggaatgtttccttcaagttgattacgtgataaatcaagttcaacaagagaagtcaaatttcccaaagaagttggaatggttccttcaagttgattagatgacaaataaagttcaacaagagaagtcaaatttcccagggcatcagaaatagttccatctaagttgttgtccattaggtacaggaacttgagacgatgaagaccgtataagcaatcaggtatagaagatgagaatgaatttccagacaagtcaagattttgaagaagtgtgaggtttcggataccaccaggaatcggaccttggatgccattaccctgtaattgaagagaaacaagtttcttcaatttgaatatccacttggggacaaaagaaatggcaggggaataacgagtacgggaaagatcgagagtttgcagagatgagaagttgagcaaggatggttcattatagtgagggagtgtgcagaatgacaaatataggtgggtcaaagaaggaagagattggagagtgtgtagccaatgaaatgctttggataggtttgcattactcaaatgaagatattcaagcttccacatacttgatacccattctacattttcagctaacagatcataactacctccaaggccaagatagaccaaattggagagattcccaatctgagatggaatcttccccatgaatccagcataagagaggtcgaggtgagtcaaggaggtcattgcacaaaggaaagaaggaattgccataccttcaaaataattgtcgctcaagtcaagatatcgaagcttagagagattcccgatctgagagggtactgttccgtaggcaacatatctcaggtcaagatacaccaaatttgagagattcccaatctgaggaggaatcttccccctgaatccagtaagagagaggttgaggtgagtcaaggaagtcattgtcccaaggaaagaaggaattgacataccttctccaagaaatccattgccgctcaagtccaagtaattcaaatgctttaaatcagccaaacaaggacttatctctccaccaaactgggatttctcatagaaagcagagttgaggtgaagctgaagaagatgggaagtgacgttgtggcagaggactccataccagtggcaacagttggtattattaggattccaagaccaaagcctattggaaggatcattcagattattcttaaacttcaaaagtgtctcacgctcacttgggatgcacacactctctctgcatggtaagctcaacaaccaaagctggacaaagacaagaatataaatggagtaataatcaaacttctattatttatactgctgccctgcctgtttttttcttcactttcattgttttttttacctttttttgttattgtgccctgcctgtttttttcttcactttcattattttttacatataaatcttagaatacgaaaatttttgtatttactgtatcaatctccctttttaaaattcctatatacactaaattcataaaaaaaatcaaaattaataacaaagaaatatgatttattcttgtgctgaatactaacataagaaacattctttttggtacagttttttattttttttacaaaaataagtaagaatcattttattttaatttacactataatctgcttaaatgaaaatttggtgtcattaaaattcaaattttaacttttatttaatcaatcctttcgttaaacttttgttgcgtacaaaagtccaatatttttttaagaaaaaaatcaagtcttctatttcatcaaatcccaacccatgattaatattaaattatcaaattttcaatattcaaactaaaaataatgtaaaagaaaattgtcttctaaatcatagctcacaccatcaagtgttttccattttttcatcttgaacctttggacactccacaaagtccagccatgatgttaaggtctgacttcttcaacttaaaccatagatcactgcattactttcatatcaaacaaatgttgcgagttaagtaaagcaaggaaaaaaaatataattgatgaataaatcaattataggaaaagagtttactttaaagataattttggttaaaaaaatctataaaaaatttattttgttctaagctagctatttaattttgatcaatttttcaattcacaaaataatattcttcttatatgtgaaaagactaattaatcttcattgtcattaatgattgttgtgttgtctatttctaattgtttttttaatcatatattattttctttttattaaaaattaattagtgagatacaaagaagtttaaattgcttgtttagcttggtctatcataattattgagatcatagttttttcttttataagtcttgtttcaaatttctccatgtattgtagatcatatttaacttaaaaagtaaattagaagatctacaaagaagtgtggcatgttttttaaattataaaattatggtcctagctatttattgttagaccacaagtcttcatatattaaagtttttgtctaaatttcatttatggtgatagtttaagaatactgatagaagagaaaaataaatatacaacttattgaaatatctaactcaattaattgaggaatacatcaattatagaaaaagggtgtgctttaaagactatttctattaaaaaatctataaaaaaattatttcgttccaatctaattatttaattttaataaatttttcagttcacaaaataatattctcttatataggaaaaaaacactaaatttaattatcatcaattggaaaaattattgtgtcatgtatttctaattgtattcgaacttgaatattattttatttatcatataaaaattaattatttatataaaagacataaaaagaatattaactttttttctcaaaaaaaatcagtatcatattttatgttttttacaagttatcaacttaaataagaggagaaacataattttaattttcattttactttttaaataattgcaagtgccaaatttaaataatcatgagaatactcatgtttaatataatattctaaaaaaaatccatacgataacttaaacaatctacaaagaaatataatttattcttgtgccaaatgctaaaacaagaaacatttttttattttagtttaccgtatagaattgcttaaatcaatgaaatttttattttaagaaaatattaatgatttttacatcaaaggtaattaaatttggcttaattagtcttcaaattttaactattattcaaatcaatcctttcgttaaacctgtacatgttaagtaaacaacaaaaagtcttgccttataaaattcaaacattttattacatgtggtttgaacccataattaattttaaactatcaaattttaattattcaaaataaaagaaatgaaaacaaaattgactcctagacaaaccgctggccacctgattgttgccatttatttcttttactcttttttttggttcttttattttgtccaactttaactttaactttaattagtgaggctcacgcggatttgttctttttaaactttcttttcattttaccttactttctgtgtaacaaccaagaggaaacattcaacacgcaaagatgaattcaaaattcaacacggattcaaattatttaaagaccactgtgtagcagcaattgtttatgaagtttcaaattatttaaagaccactgtgcaagaagaaacattcaacaggcaaagatgaatacaaaatttcatttttaaagatcactctgtaaaagagacgacgtctaaggtggatcattgttggaaacaaatttggcagctgtttttttattatcttgtacaatccccagcgttttctctgaaaactaaaccttggccaattctgaacaaatgaattatgatcggtttggttttgtatattttttttcatctcaaactaatttttttttatgagaactaaataagaattaaataaataattaaacaaattcaaaatgtcacattttctagactcttcccactactcaaatctcacattaattaaatcattcatttctaaactcactactatcctaaagtagtaaagtccctctcatccttcataattccctttaaatctattgagtaaagatagagacagaataaagaataattcgaataaagacagtaatggccgatggcgtgccgttttgtgcattatatgatgtggtccacaatttgaaacatatataaattatattatatatgtctaatttatattatggaaaatcataataaaggtctaattatattattgaaaatactatttttacatttcacaagataaatgtcttatttattatgtctaatataaattatactagataaatgtctaatttatattattgaagttcaatgaataaatatttttgcatatataaaattatatcttggattttataacaaacaatttaaattgtgaaaataaattacccttcaccagcagcaaggtcgaagtagagatcaagaatgttggggcagcttttgtagcactgagggaagcaaaggttttgtgtgaaaccactttccataagagaattgatgagattccaaaggattttctgcacgtgtaagcttcttcccctgttctcttcacatgctaagaacatatttttaaagggaaattcttgttgttaagaatttgtacgtgtatgcaacacttttgaactccgtcaaagattttttttttttaaattaacatttccaccaataatatgcaaacacgtttgtcttgggttggtgcaaaaaattctcgtgctctatagaaatttgaaatatggatctacgtttaacttccttgaatgaaagaaatatgtaaagggtacgatgtaaaatttacccacggacttaacttaaatgtggttgtaattaattattttttttagagaaaaatgattatgtaaaaaaatttatacaattatttaagtacaatttattatatataatacattttttattaattattttaaaataattcagatcatgatttatgattaaatgattatataaaattattttatatggttagtatattgacattaaactttttatttttaaatgataaacttaaatataatatttaagatattttgacagtgttctttagtcaaaattagaatttaatcttggtaatctttataataagtattttcattaaatatcaagatattttattgaggtataactccaatctactactgatgagaaaacaaaactatatataattccaatcccatttttaatcaattaggagttacatccctttaaaaaatccagacttttcaatgactaacaccctttttctatgcaatatacaaggatcaagtttgaatgtacaatcttgggatggaaatcaaattcgtatttggttgacgatatttaaaaagtagtcattcttttcttacagctttctgtcagaaaattgtaaattaaatcaaacatggatagaatatgctggaagccgtaaatgagtatttaattaagaagttgattggctttaaaaacttacaagagttccttgcattatgactagaaatgcaagggcaactattgtcaaaaatctcgagctaatgttaagggccatggctcaagcagaagaagatcgttgggataataagccaaaactctagcttgggagtttggaagtttggttgtgcttttgcatatactttgaggattgttgtgatgctttatggctagttaatgagggtatttatagcgtattcttcaagaggacaattttattcttttcttagtgatgaaaagggatattttatagaaggtggacttttcgatacgaatcaaaagagtggaaaacaaagaacaatagtttagtttttttttttttttttacagaagtttgatttaacctacatgacatgaaaatgctttggaaaattttgattacacttaacacttttgtgtagagctttttataattcaaaaagaaatgagaaggtaaagaaagaagcatgaaatgatatgaatgataaattataaaatacaataatatataattcaaatttatgacaataaaaatgagataattttgtgtctcttttataaagaattggttttttaaatgcatattcataaaagataaaaataaatatatagaaaacaaaagtaactagatacgatattagatcaatttgtttttgttacaatattagatcaatttaatgaagatagaaccgtatgtcaaatagttcatgcattcactgatagaaattagaattatttttagttaattggcaatgtaaaaattgatgttgtgttatagtttttatctttaaatcagaagtattttttttttattaaagataatctacttgttcaatagaaatagaattattatagatgataattttttatataaatatttaatataattatatatttaagattcaaatttaaaacttccaattaaactaaaataagattacattgattgatcgatagacttagtgttttatggtgtgatagttagaaaagatcatatcgatgcaagtgaacagtgtgagctaggtttgtatgatggctatgataatgacgaattaggtttggtcactagctactactactagtcaagcagtgcccgctatcaatggagaacctgcgatactttatgtttgaaagaaaacaaaaagattgatcctactgggtcctcatacagaaactatctcatgctgaaaattacgaaattttaagaaattcaaatgaaaaatatagtgaacaataaaattttttaaacaatcataaataacataattttatacatttcaatgaaaattattttcattttacttttttaatgaatgtcctcaccagttaacatgcatttggctaataataatggacagtgaagctacgtttcttattttcgacaaaatttaattatttctactgatctttttggtcaagctactattgaatatatatatattaaattttccttttgggaaaaattaacaaatatcttttacattatgctggatatttttaatttaattaaaaatttaaaatacaacataaatgttatttacaacaaaaggaaagataaatttaaagtataataaatgatatgatggttagaaatagataaataaattaacgttgtctgaattatatgaattgttgtaagagtgtcatatttctatcatatataattttatcaacttacattctaaaaaaaaattatttactatgctctgaaaataagttggaaaaaaatatctaatcagttcgtactttattcatttttcatgatcaagtgaaaaaaaattaataatattggatgcccccatagtgtgcaactacagaccttcagtttgcaagactgaagtctctacgtaccattgagctacagaggcaagaacattctgaatcaaaaattgatttttcaattggttcttcctttcctcccttatactctcctcttttcataaaaaaaaggttagactcaataattttcatctttatgtttacaataatattttgttttatgtttttaatactaacctagagtctacagatcaaagttgctgaaaattatgttcattctcattcttggcgctgttagtctagtttgaacacgggcaaattcagtttcctgttatatatggcactgtatataaaaaggaaataaaaaaaagtagaatttgattatggctaatttcacccattatatttattacaagaaaacctttagataaaaattaattttttgtacttttagcttggtcgtaaacattaacgttacatcacgcacacacacataaaaggcaaatcaaattattttatatccctaaattttatgaggaaggatgctataaatattaacaatacatctcacacacacaaagacatctaaaattatatcactaagttttatgatgtgttacggtttgctttaaaatatggtacaaggtttatcagagaccggcttataagtaaaaattaaatttgtcataaagggagtaaaatggaaaataattaatttcttaattagaattaaattagaataagctgtgcagatcttataatttttgttcactaattcgcccaccacataatgctttaatatttccaactttgtataatctaaaaagtataaaaatgaagattacgactttcagcctccagttccttttaatggaagaagtgagtaaatgttgatgcgatatcggtagctttcatgggcagtgaccttgtcaaagaatgcttgggcaatgatcattggttatctatggatatctcatcaaagttcttggagagtcaagtcttgtatgcagccacgagtcacgactttaattaacacgaaagaactaattattcacttcaatggttagtgactaaaattaaatataagtttttttcctattaaaccacgttttcttgaaccactagtcccccatttttggaaacaagaatgtgatacacagaattgaacaactagttgatcttaactacaaatatgctcaatatgcaaatatgtacatcccaaaacagaatttaaataagactctcaaatttgaaaaaaaaaaaaaaaaagatagcaataactacaatgcaaattgaacaacctggcaatacaatgatacaacatcggttgtaagcaacactaaacagtgatactatacgaggaaaaagattgaagtttgaaccacacatgatcaaggaaatgaaaatagatatgccgccatgatctacaaatcagcaaaggagcaatcactatccaaagtcccacaacaaatccaattgtcgcactaacaaaaaaccaattcactccatgcccatgacttccttcataactatgagttttcccattggagctgcagtttatgggcagtggtggaccacatagattgttgccaataaagctggaggcatcaaaggtttgcaattgagttcctgttggaatttttcccttcaaatgattataagacacgtctagcatgctcaaaaagctcaaattagaaatggttggagggatttcaccagaaatttgattcctcgaaaaatcaatggtttgtaacgatcccatattaccaataccttctggaataggaccaatcaattggttgtgggacaagttcaaaaagttcaatccatttagatctgtgatttctctaggaatttctcctaataatttgttacttgacagatcaatacttgttaccaaacccagaatgtttccatactcatctcctcttccttttagccatagtagcacactaactatacctgataccgaagagtattctgtatgatttggtgcatgagaatagatttggggatatggactccggttcactagtgtcatggcactcaagttatggaaacagctgggtatattgccagacaaattattttttgcaaggtctaaaacctgaagaagactcatctgacatatttcatttggaatgtgaccggtaaaactgtttgatcgaaggcggaggattttcatatttgagagcttttctccaacccatgttggaatacatcctgaaagattattttctccaagatccaaggatatcaattggcgagtcttcttcaaactggtaggaaatattcccgagagcaagttgttacgaatttctaatgactgcagctcagccaaggaacccatggatggggggaagttcccaacaaaatggttgctttgtaaattcacttccactagaaatggccaattaatccaacaatcaggtatttctcctgacagattatttgatgcaagattgagaatttctaattgcattggcttgtccagattgttacataaaaaatcttgcatggattcagagaatgaattggttgaaaggtctaagtcatacacatcatttgaaagatagggtaatttaccacataagtgatttgtgcttagatcaacagtttggatagatattggattttgtaatgtagtcacaagctcaccatggatatgattatgagagaggtttaaatacaaaacctgagagtgtggttcccagaaccaagtgggaatagaatctaaaatccccgtgttagacagtccaacatattgaagtttgttttgtgactgaatccacgatggaaagttgggacctatatgccatgatgtcacatccaaataggtaagttgaaaattaggaatccaattaggacccacttttaaagtgaaattgttccctgatgcatcaaactccttcaagcttgtaagatttgcaagatcatcttcgttgacaactccttgaaaattattgccatcaataagaagcgttgacaatttagagagtgatccaagactttcaaatggatttccgctgaatttattaatagagagatagagatattttaaatctatctcccataagttgcggagattacccaaaaaagtcggaattgttccttcaagttgattacgtgataaatcaagttcaacaagagaagtcaaatttcccaaagaagttggaatggttccttcaagttgattatatgacaaatcaagttcaacaagagaagtcaaatttcccagggcatcagaaatagtcccatgcaagttgctggaacttaggtccaaagacttgagacgatgaaaaccgtataagcaatcaggtatagatgatgagaatgaattgaaagacaagtcaagatttgaagaagtgtgaggtttcggataccaccaggaatcgggattttattaccccgtaattgaagagaaacaagtttcttcaatttgaatatccacttggggacaaaagaaatggcaggggaataactagtaccggaaagatcaagagtttgcaaagatgagaagttgagcaaggatggttcattatagtgagggagtgtgcagtctgacaaatataggtgggtcaaagaaggaagagattggagagtgtgtagccaatgaaatgctttggataggtttgcattactcaaatcaagatattcaagcttccacatacttgatacccattctacattttcagcaaacagaggaggttcggaaacagaataaccttcgaggttcaggtcaagatacaccaaattggagagattcccaatctgaggaggaatcttcccatagaatccagtatcagagaggtcgaggtgagtcaaggaagtcattgtcccaaggaaagaaggaattgacataccttctccaagtaaataattgccgctcaagtcaagatattgaagcttagagagattcccgatctgagagggtactgttccgttggcagcaacatatctcaggtcaagatacaccaaatttgagagattcccaatctgaggaggaatcttcccacggaatccagtatcagagaggttgaggtgagtcaaggaagtcattgtcccaagaaaagaaggaattgacataccttctccaaggaattcattgccgctcaagtccaagtaattcaaatgctttaaatcagccaaacaaggacttatctctccaccaaagctccatctccgataagcttcccaatcatcattgaaaagagaatctgaagagttgaggtgaagctgaagaagatgggaagtgacgttgtggcagaggactccataccagtggcaacagttggtattattatgattccaagaccaaagcctattggaaggatctatgagattattcttaaacttcaaaagtgtctcacgctcacttgggatgcacacactctctctgcatggtaagctcaacaaccaaagctggacaaagacaagaatataaataatggaggaggaattcatgatcacacaagaatatatagaaaacaagtgtagttgttggttccgcatataaatcatcaaacttctattatttatactgctgccctgcctgtttttttcttcactttcattattttttaccttttttattattgtgccaaatactaaaatattcttccattctttttttacgctggcctctttaaattatcgatttaattatccaattctcccgaattaattcttagaatacgaatttttttgtatttactgtatctatctccctttttaaaattcctatatacactaaattcttttaggtacagttttttttttacaaaaataaataagaattattttattttaatttactctataatactgcttaaatgaaaatttggtgtcattaaacttcaaattttaactattatttaatcaatccttccgttaaacttttgttacgtacaaaagtccaacatttttttaagaaaaaaatcaagtcttttatttcatcaaatttaatattaaattatcaaattttcaatattcaaactaaaaataatgtaaaagaaaattgtcttctaaatcatagcttacaccatcaagtcaatctcaaggttttccattttttcatcttgaacctttggacactccacaaagtccagccatgatgttaaggtctgacttcttcaacttgaaccataggtcactgcattaccttcatatcaagtttcctgtcattgacaacaaatgttgcgagttaagtcaagcaagaaaaaaaaaatattattgatgaataaatcaattataggaaaagagtttactttaaagactattttggttaaaaaaatctataaaaaaaaattatttcattccaagctagctatttaattttgatcaatttttcaattcacaaaataatattcttcttatatgtgaaaaagactaattaatcttcattgtcattaatgattgttgtgttgtctatttctaattgtttttttaatcataatattattttctttttattaaaaattaattagtgagatacaaagaagtttaacttgatctatcataattattgagatcatagtttttccttttataagtcttggtccaaatttctccatgtattgtaaatcatatttaacttaaaaagtaaattagaagatctacaaagaagtgtgacatgttttttaaattataaaattatggtcctagctatttattgttagaccacaagttttcatatattaaagtttttgtctaaatttcatttatggtgatagtttaagaatagtgatagaagacaaaaataaatattcaatttattgaaatatctaactcaattaattgatgaatacatcaattataggaaaagggtgtactttaaagactatttctattaaaaaatctataaaaaaattatttccttccaatctaattatttaattttaatcaatttttcagttcacaatattctcttatataggaaaaaagactagatttaattatcatcaattggaaaagttattgtatcatgtatttataattgtattctaacttgaatattattttatttatcatataaaaattaattagttatataaaagaagtaaaaagaatattaactttttttctcaaaaaaaaaatcagtatcatattttatattttttacaagttatcaacttaaataagaggagaaacataattttaatttccattttactttttaaataattgcaagtgccaaatttaaataatcatgagaatactcacgttcaatataatattctcaaaaaaaaatccatacgataacttaaaccatctataaagaaatataatttattcttgtgccaaatactaaaacaagaaacatttttttatttctagtttaccgtatagaattgcttaaatcaatgaaatttttattttaagaaaatattaatgatttttttaaaactttaagtaatttacatcaaagataattaaatttggcttaattagtcttcaaattttaactattattcaaatcaatcctttcgttaaacctgtacgtgttaagtaaacaacaaaaagtcttgtcttataaaattcacacattctattacatgcggtttgaacccataattaattttaaactatcaaattttaattattcaaaataaaagaaatgaaaacaaaattgtctcctagagaaaccacctgccactccaccaaatccatatcaaggtccccacttttccaacttgaaccatagactacttcatcaagtctatgtcaaggtcctccacatgcaatgttatattatgtgatttttttcccattcaatgttatatttagctacacatcaaaattaattttatacaaaaaaatttacatataggttgtttttagtgaatcaaattcttttttaattcaaatagggacattagttttcgtatctgttaagaataattgctacctaatttaaataattgtattaaattctaattatcaaaaaaattccgtattcattatcataaaaatatttaacaatttaatcattaatttcgtattataattgatacttgacaactaatatttattgcacttaatttcatttgataataactgatatttcttcaatcgcgtatcatttgtggcaaaacgaacatccaatatcattggagaacaatgttgatgtaacgattaattcattgagaatcacatgaatgcattaaattcaggatattaaatttacaaataattttatgtttttcaattatattttaacaataattaagaaataaatctaaatcgttctacatttacatttgtttataggtatttgggatattggagatgctatatgcgaatctaaattttgcttaacacaaaaatgtggtatgcaaggaaaaatcacattgaaatatttttatctgccacttcaaattttaaaagatttgtttcaaaataaggatatgaagaacaaattattgattttagagaacatttcctccatgatgttttcctttcctttaggtgaaaaacaaatagacatttccaaaaataatgaaagtgcatcttatataatgttgtttatatagagaagtctttgaaaatataagtcaagtactattactacaaactattctgtatcatatatctcttatatattttcatataaaatatttattaattttttatttatttcttagtaacatgtacatgaaagtcaaaccaaatcgaatcgaggatttatgtggcatttaacttttatcactttttgccctaaaagatcacactctaatcatgtaccaaaattttgtggcgtacaagaaaactcttctatttgggaacagtcgatctttaaattatcaacttaaaagaagtggtgaaaaagaatttaacttttttctataaaaaatagtatcatattttgtattttttataagttatcaacttaaataataggataaacataatttttattttcattttactttttaaataggagaaacataatttttattttcattttactttttaaataattgtaagtgccaaatttaaacaatcataaaaatactcacgttcaatataatattctaaaaaatatatttatacaataacgtaaataatcttctacaaagaaatatattttattcttgtctcaaatactaaaataagaaacattttattttaatttacagtataggatttcttaaatcaatgaaatttttattttaagaaaatattaataatttttttaaaactttgagtagtttacagcaaagtaattaaatttggcttaattagtctttcaattttaactattatttaaatcaattaatccttttgttaaacctgtacgtgttaagtaaataacaaaatatctttgaatcatagacgactccatcaagtccaagtcaatgtccatcattttttcatcttgaaccttaggacactccacaaagtccagccaaccatatttaggtctctatcttcttcaacatgaaccataggtcactacattaccttcatatcaagttccttatcattgacaacaaatgtttagaattaagtaagcaaggaaaaaaaatataaatgatgaatacaccaattataggaaaatgatctaatttaaagactatttcggttaaaaaatctatataaaaaaagactctttcgtttcaatctaactatttaattttgatctattttttaatttacaaaataatattcttcttatatgtgaaaaaaaaactaattttcattgtcattaatcggaaagattgttgtgtcgtctatttctaattgtattttagcctgaatattatattctttttcattaaaaattaattagtaagatacaaagaaatgtaaaatgcttgtttaacttggtctatcataattattgagatcataacttttttcttttataagtctttgtccaaatttctccatatattgtagatcatatttagcttaaaaagtaaattagaggatatgatataccaagaagtgtggcatgtttttttaaattatttatctatggccttagctattttatttttagaccacaagtcttcatatattaaagtctttgtctgaatttcatttacttgtgtggtgatattttaagaatagtgatagaagagaaaaataaatatataatttattgaaatatctaacttatgaagatttgcattcttaatgcataagattttcagtttatatattatcattatttggaaatattgtttgtgttaattgtctatttctaattaatttgaaaatgaatcttaattttttatcataaaaattagtattatattttttattttctttacaagttatcaacttaaatactaataggagcaacataattttaatttccattttactttttaaataattttaagtgccaaatttaagcaatcataaaaatactcacgttcaatataatatttttaaaaaataattcatgagatcacttaaataatcttcaaagaaatataatttattcttgtgccaaataaacaacaaaaaaagtcttgcattattaaattcaagtcttctattacatgcaatttgaacctataactaattttaaatgatcaaatttttattattcaaaataaaagaaaagaaaaaaaaattgtcttctagacaaaccagagacaactccaccaaatccatatcaaggtccccacttttttaacttgaaccataggccactccatcaaatctatgccaaagtttcttatcattgacaacaaatgctgagagttaagtcaagcatgaaaaaaaatagggtaaaatatatcatttctatccctataaaattttaatgtgctactttttttttttatcctgagttaagtttggatgatagataattatcatgtattcttagattttggtgtcattttaggatatttatgtgatatatgtcttttatgcttttttattgtcatgaactaatcttctcttttgttggagttgaatataattggttcatttttcatgtaatgactattttttattgaataaagcattctaattgtttctcttctatgtttaatatgtgtttttggcttaatcaccttgtttgtatgattttttttattcaattgtaatttaaatttttttttgaactacgaattgcaaaaaacacctaataatttttatgtctaggaataagataaaaagaattgagcatcaataaacactttatcttaatgaaaatcatttagttatattaatttaagggattaagggatttaggtctcttcactaggaattaatgtgaagataatatgatgggattatgataatataacctttattaaatataaatgtgtagttattaggtaatagaaacttcaatgaaattaaaccccaacaattttttcattgatttaaccccaacaattacatgaggtgtttgttaaaattcccaaacnnnnnnnnnnnnnnnnnnnnnnnnnnnnnnnnnnnnnnnnnnnnnnnnnnnnnnnnnnnnnnnnnnnnnnnnnnnnnnnnnnnnnnnnnnnnnnnnnnnntttccttaatttttccctaaattttttttttattttcttctttaagtttcttattttttatttcttacttaatttctttatctttatgcatatgttatttaaatcaaattagctaatgttaattaatttcaaatatgcatagtatagaaattatactttttattacccaattattgcctaagtcctgttaatgctaatcattgttagagcacagatagtagaagacaataatgcgtgataaatacaaaacagaatttgatgctcaagtctgaagctcgtctagttctcttaacattaagaacatttattaccaatgaaagcaaaactaacagacaccccatatgaacatgtacatagtatggtaaaccttttcacatttttaatgtctagaataacacgttgtaatgtctctcactcctaacagttaacatgtaaactcacaatttcccaagtaaccttcttaccttcaaaactattatcacataaatcagatctctcaagtggtcaagataatgaaaataagcacgcctccaagttctgttgaagaaaacaacactgcaaaaaccccaaaatcctgctgcaaatccaactcccataccgatataaaactctgatgttccaaagaaattaccatcaccgtgtccaacagaagcactctctgtcaactcttccttgtctgtgcaattttttgttacaggaggaccacaaagctcaggatttccagtgtagctaagttcttcaaagctctgaagttgggtgctcgtgggaattctgcctgataagttgttgtatgatagattcaggacactgaggaaggacaaatcagataagctttgagggatttgacctgaaatgttgtttagtgagagatcaagggattctaacaatttcatttttcccatgtcatttggtatccctccagacagatgatttctagacaagttcaaaaaccgcaaagcagatagcttggaaatttcagatggaattgctccagacagcttattacttgaaagatcaatcattctcaccaatatcagattgtctctgtactctaactcatctcctttgggaactaagacaagagtttccttgtagtggttataactgaagtcagagccatatgaataacttaaagggttggcaaagaagtcatcttcaccagccattgtcttcatgtcatccaaacaatttggaatggatcctgacaggctgttattgccaagatccagcactataagggaagaaagttgacaaatcttttgagtaatgctgccattgaaattgttggatcttagacgaagaaccattagatattgcatttcccacatccaatctggtattgcgtcagaaagttggttattgcccatgtcaatgaatttcattgtagagcaattttgcagtgttgaaggaatatatccagagaagcggttgtcgtctaacaacaaagactcaagttgagatagataccccatggagtttggaatagcaccagacaaattgttactacccaagttcaaatgcaccaaagcttgccaatgcacccaacagtgaccaagatcaccagataagacattatttgaaaaatcaagcacacttaaattattagtagcattttcctttccacataaaaagggagaaattgttccggaaattgagttattggcaacattcagcacttcaacatttgcagacacacttggcaatgtaccagtgaacaaattagaactcaaatttatgaggctggaattgagaaagatgttagataggtctccacttaacagattgttggacagatccaggaattcagtttgcaaagtccaattccaaaaccaacttggaaccaagtctgcaatacctgccttagacattgtcaaaaccttcacagaactttgcctttttagccattctggaaacttaggacctattccaaaggagctcagtaaaacatattcaagctgaaaaggaggaacccatccagagttgacactgaggaacaagtttgtccaagacaaacgtagttcctttaatttcaaaagttttacaaaatttgactcttttatagatccttctaacaaattagatgaaaggtctaacatcactaaatttgagagagttccaagagttacaggcatatcaccagtcaaagaattagttccaagatttaatacctgcaggtttctgaggaactcaaaactcttaggaatggttccattcagtcggttgtgagccaggtttaaagttctcaaggatgacaagtttgcaaatggtgagggaattggacaagtaaaggtattattactgagatttagaacttcaagatgcttaagctggcctaatgaatctggaagtggcccactgagctggttgttctgcaggtctagattttttatgttctgaaggcttgatattatttgtggaatttctccctgtaaaaggttactgtgtaaatcaagttggacaagagctgtgctgagattaaatagccatgaagggatttgctgattgagattgttaattgaaagatcaaggacttggagatgtgtgaagttgatttttccttttggtggtcctaagttatcaatttgacagctctccaagtgtagttctgaaagagatggaagttcactcagtacttgaagccagttaccttgtttatgaaggtctgaaccactcaaatcaaggtactccaaggaagatagccttgatatccaattaaggttatctatctgaagagcataattgtatccaagattaaggtgctgcaggtttgagaggtttcctagttgatgagggattaatcccatgaacccacttaagctaaggtccaagtatctcagactctccaatgagcctaggaagcttggtattggagtaagaacaaaataatttgaactcaagtccaaacgattcaaatattttagttcaagcaaagaaggactaatctctccactcaactccctatagggagagcccgcaggtgtgtcaagattgatttccatgactttacctgtgttgttgcagtgaacccctggccatgtacagcaatccgatttgtcagaccacgatgaaagcctgtttgaagggtctgctagtccatgcttgaagctgaggagtgcattcctttccttctcgctgcaagtcatattgagccttgctgccttgcttgcactgaagtggagagttgttgcagtggacaatatcaagagaagaacatgagttgcaaatagcactgccatgaagaagaaggaagacgaaaaaggttgaatccacaattttctggttcacggttggtatttactactaacaatgcctatataggatatataccatagaagggtttgcatttaaaattttattccactaatggtggtggttgcaaaatgcacacatatgtagaggtatatatgtctacaaggagacatttaggattaaaagtgcctaaccacaccaccattattttgctctagtttattttattttgatttaattatccttttagtccttatagttgtgataatttgttttagtccctatagtttaagacattcattttggttcttatatttccaattttttttatcttttggtcctcgcggggaagattcaactcacacataaacatgaacaaaattaataaaaatagggaagcaagctcaggtacaaatgaagtgtaatggaggtatgagacaaagccactacacattccattattcttgagtctgccaccgacctctgcaagcttagcatttgccaattgccatgatgtaatctccttcttgacagtctctcatcaagttggagtggtatcacagcattgaactatgttggtcgttccaatgggatgatggttttgattgctgcagataaagtgtgtcattgtgagtttctggtcccatgagttaaactataaggactaaaaaaaatattgtcgtaactttaagggccaaaaggataattaaaccttttatttttttataatttttttttacaacgggttatatatatgtagcagtttattctaaacaatggactacgtgtgaaatctttgaattctatgtaagaaatattatttcaaatttctcatcagtcttcatgtcaatgatgacatgctccatttgaattctatgtctaattaagctctcggtcttccgtttttgcaactttatttcgtagaaagaagccaaatttgaagatacaacatttgatactataactgtttggtgttttgaaaatctcactgacatatttccaaatgttacaatctcctagccttttttaccaagtcagggaatttgcattgttgtgcatgatggctgccacaagcacccttgtgccaacccattagtgcaagtggttttttcttatgagaatttagaaacaaattatatatgtgttttataaagggaattctattatttttaattttgaacttgtaatgttttttgtttccctcacagaacaagtgatgtgactcttgatcgacgccatacgtacgcatactttgatgctcttttttctcaccacttttatcttaatggtatctcaagttgacaatcataaattaaaatagctaactatagttgattagtagagacaaacagttcaaagataaagatctttaagccatcattttttttgccttttcttttctatgaactgtcatttcttatctctacatggaatgtctagaagttgaaaattacttgagctttctttacctatactgctttccattttggcgaactgcttttctttctcataatgaaatttccacttccaatgatggttgaacattaataattcttcatctattttgtctaaaaatttccactcactttttgtgagtggtgtgaatgtcttgcagacaaatgatgtccaagctccactttttccattcattgcaagttgtaagcagaatgtagaatgtacgtataataaaataatgagaatggcaactgctagtactacttaattagaacaaaagtatcaaaattaaaacgaaaataactttgatgctgttaatatatgagtttaattttgatagatagtgtaaaaatttaaattgttaattaattagaaatcaccaaatgatttgtaaaacaattagtaaaaaagttataggaaatatatataattaattaattgcaaatgaaagtgtatttaaattaaattcttaattaacatatccttattgtgatattttgtatattttttatttaattgagacagtggaatgaaaccgcactataattttcatcacgggtgtggttgtcaaatataatagggatggttggtgaggaattttggaatgttagttggttttagactatatatcctcttgttcagttttcacattctcattagagttaagttgcttttggggaagaaccaatgtcttgaaattccctcttcaccagaagcagttttattgtgtctttatcgaagtcatcttctccagagacttgcctttaactttgaagataggaaatagatcagtcaaacattgtttcagtttatttggattttttttgaatgacatgtgatttacaaagacttcttacaactcacaacctttggaatttctctatgcctggttaacccacaatttcggcgcctgttgcggttaggaacataggctagcaaaaacactaatcatttcaagagaaatgttaacacacttttctaatatattattttttatattaaaatttattaaaataaaaaattcagctgatctcatattttatttagcaaatttttctcatatattaagtcttaggtttttaaaattataaagctaaaactaaaatgttttactaaatgtattttaaagtaaattttatacacaaaaatattatgattttataaaaattgtttggtcaagggagacatattgagccctcctaactataagctaccctgagggtctctatcttttttttttcccacttaattttttactttggcagcaagggttaaacctaccacatctacatgactatgtcttactttcaataagttacacctaaatagttaacatattcctcttgctccctcaggccgagggaattctcacacaccactcctaacaatttctaaggaattccacaacgtgtctatgcttcagacaacaataacgtaccaaataaacaagtagtatctaataacgttaaaataagcacacagatcatctttatattatcaaattcatttaattaaatatacaattatcttaatattataattaaggaactcaacgtaaaataacaatttattaggaaataaatacaaaatttgagtatttattaagaataaaaacatatttaatttcatttagtgtttaatagtgttttggtcttttttgtttttgtttttttatagttatttcttttcaaatttgatgacaacattgtcattgggtccttctacccttcacatcagcaaattggacactaaagagactcggtcagaaacaaataactactaggggtacaataacatgagaggatttaacacttttggagtaggaaaatgtactttaagaaaagaaaattatatgtttatccatgaacactaagctctagacaaaaaaaaaaaaaaaaaaaaaccacgagaaatagtatataactctttagtggacaattggtgttgtacaaaattgaaatgatccagactaagtcaacaaactggtcttcttcattgaactcacagtgaaaccacagaatttattttcatctgctagtttccttcccaattcccatgttttctaaaacataacacactacagaaccttctaataaattaaaacaaaaaaatcaatattttacatgtagcaccacaacctaacaatttctacctacaactttttctatagactataatataatctatctccactcaatcattcatcaagattgagaaatggattcaaatgcttgtctaccacacttgctagtgttagcaataacattggtattggttagtcatgcaatgggagattcagctcaagacaaacagagatgtgcagaatccctgacaggtgttgcaacgtgtctgccatatttgggtgctgacgcgaaagcacccacagcagattgttgcagtggtctcacacaagccatgaagaccaacaagaagtgagtctgccttattctcaaagacagggatgatcctgaccttggcttaaagattaacatgacaatttctgttggtctcccttctctttgcaaaacacctgataatctctcacagtgttctggtacgttcaatttctaattaagccttcctttttcttaaagaacactacactacagtgttatgtttccatttcctatgcaatgaatgatctatcagtcttgttagttgtcatataagaacttatgtttttacattcagttgaaggaagttcccagaaggaacagatgaaacggcctcagctaagaatagtgaatcttatatcgggaagagattcttagaaagtttggttgcagttgcagggcttctaatttggctttcatgagcttaactcaaatactacctatatattaccattttcatatcacgttgaaatgtaaaccattgattagttgacactgtaaaaaatatttacactcttgagtgtactaaatctctgacagactcacaatagatattattgcaataccttttggagatttattttttgtttttaatactaacctagagtctacagatcaaagttaattaattgctgaaaattatgttcattctcattcttggcgctgttagtccagtgtgaaaacggacaaattcagtttcatgttatatatggctctgtatatgaaaaggaaattaaagaaaaatatggctaatttcacccattatatttattacaagaaaacctttagataaaaattatttttttgtacttttagcttggtcgtaaacattaacattacatcacgcacaaacataaaaggcaaaccaaattattttatatccctaaattttgaggaaggatgctataaatattaacaatacatctcacacacacaaagacaactaaaattatatcactaaattgaggtggggatagttttgaaaaaaaaaatagttggtgtggttgtgtaggtgtgtttttatgtttttcaattcaggatattaaatttacaaataattttatgtttttcaattatattttaacaataattaagaaataaatctaaaccattctacatttgtttataggtacttggcatattggagatgctatatgggaatctaaattttgcttaacacaaatgtggtatatgcaagggaaaatcaaattgaaaattttttaaccaccacttcaaattttaaaagatttgtttcaaaataaaggatatgaagaacaaattgtttttacagaacattccctccatgatgttttcctttcctttaggtgaaaaaaatagacatttccaaaaataatggaagtgaaccttatataatgctgtttatatagagaagtctttcaaaatacaatttaaagtactattactacaaactattttgtattatatatctcttatatattttgatataaaacatttattaattttttttatttcttagtaacatgtacatgaaagtcaaaccaaaccgaatcgagaatttatatggcatttaacttttatcactttctgccctcaaagatcacactctaatcatgtaccaacattttgtggtatacaagaaaactcttctatttgagaacagacgatttttatttgaacctcttttggcaaatggaactagctttggattaccatgtgacaaaaaactactttcctaactttggattaaccaaatctgaaaagcgtttcgtgtaatattggctacgcatgactaattaacttctgaaacggtcagctacttcataaccttttgatgtcattctccccaacaaaaaacaattgcaacttgttacctagcaacagcttgaattgcttgctttctcacgcacttagtgaccctagatgcttgtgaaataaattgttataaccttcactgtttttcatcaatattaccaaaatttccttaaagtgttcaatatatcgtaatcttcataattaattcaaaattctcaaaagattagtatatgaccttttttcttgtttgtactaggagaggaataaatgaaaaaaattcagaaatttgtggattgcaatttgctcaaatgatgtgtctattagttctttgaaatttgtatatattgatcatatttatttttaccttttaatagatatattgtgctgtcatcccaagagaaggatcaaacattgatgatgcagaggtgctaagatattgcaagaagaatcttgcatctttcaaagtccctgaaaaggtcttcattactgattcttaatttgcccaagactgccaccggaaagattttgcgtcgtcttgtggcagaacacattgtctctcaaatttgagcaactgatcaagtcctacttttgaagcctccatacctggccatacatagttggagtccacacaccataaatttcaacaataatttggcaacttggcatttaagaggagggtaattctgcaaatggtctttcattcaggatacaatagattgtagttttcaatgattcacgtgaaatgttcacaatgtaatgttttcaatgttttataggtcttaaataccaatagcagacaagatcatgcttatgcttttttgctatcgtgctcctgttccttgccactggtcttgatgaagccaagcattgtctctttgccttttaagttgtacatagttgcaaaacaggtacatgtgaaagaataatgcttattaaaggtaaggttgattttaaagtgggcatgcaagaatgcattcattatctcaagtaaataaattcaagcgaatatgtgatttggattagagaatagtattatccagtgcacactaaattggagagattcccaacatgtggtttcaaaactaaaagaacttaccaactatttgaattttaatctacgtgatctagctaatgttttctatcagagaattacaactagttgatcttaagtacaaaactatactaaatatgcaaatctttacatctaaaaacagaatttaaataaggctctcaaatttgaagaaaaaaacgaagatagcaatgactacaaattgatcaatctgccaatacaatgataaaacatcggtttattctaagcaacactaaaaagtgatactacatgagcaaaaagattgaaattattgaccatgcagtatgaatgtacagcattatttatttaatttttctaatacaattttattttatattaatacactatatcattatgacatcaacccccaacatgagtggcccagtggacaagcccatcaatctaacatgtcggttgatagcacttgcataaacttttgttccttgcatcatctcatgtgtcttcattctccattctctacttccactaacgattaaaccttattgattagggttcaatgatttttcaatgaataaaattaattttaaattcttgattctaacagctcacgtatagtctgttgaatcaaatgaattagactcttgatatcataaagaaaattaaaatttgattctttgtgtaaaataaagaaatctaattaattatgcttgttatgttactatatatatcatttttccggtgtggagtaacatcaaaatcaaagtaacaaagttacttgcatgttactctaaccataattctagctaagtcgaatatggtttcatgttttgtaaaacaatttagatcccctttatcaaagtgtatctgtcttttacacaagttttttcactttattttatttctcccagaatcaattgttgtgttattcatactattaaattagtctgataactaccatgtcgatcattgttagttttgtttccaccattgtttggagtacgtatatactattactttatgattaaacgtgttacttaaattgcagataaaaattctttataatgaagtacaattgtttataactacaacaattatattgagtcaatttaacactcatcaaaggcagaaaagctttactttaagattagagagaggctcataccaatcatggcggtggttataattacacacatcagcaactgtaaaagatcttgcacagccacagaaaagaaaatgcttgatgcacatctgataaactcactcaaggtctatgtattaatagtgtaaaagagagactgaatagtaaatgataaaaatataaaataattgttttgtattggcagagtacacatatatatgcccaaatgtagattcaaagttcaaacattttgggcctatagctagaccatccctcctagtcatagccatctgaattggatcgaccccaccccaaggtttgtgttgcatcacttgcatgcattcacccaccacagttgttgttatagttttctcgtgatttttgtattggaaaatactatggacaaatataattgatacagtcataattaattattgtcatgttgcaattacaaagactcctcaaagaaaatgtttagtaaatcatgatcaagtagaaattgcaatggcaaactgttttttaaaatcttattagtcagttgtataaacccaaatttagttatatccaggtatgtaatatttgccattttagtgctctgtttggaaatttgcgtgtcgaattgtttttttttatacgtacctacacaacactctttagccaaataccactgttcatggaggaatctgtcctgaaaggagtatagaaccagaaacaatatgcgtggtggtatctatcattctgaaaaagagaaaaagtgggatacgtacaataggaggactatgacactaggggtggaaatgagccgagcagcttgtcgagggtctttggctcggcctatgtgaggctcggctcggctcggctcgacttgtttattataaaggtcaaactcaagcttttgaaaaagtctttttagattaaaaggccatgcccaaactaaactataaaaaaacaagcggcttataataataataataataataataataataataataactttattttatcaaatcttatcttatccatattttatttcatctagattttatttcgtccagattttatttcatccaatcttatcttaacttatccagattttattttatttcgtttatgggcttggacttaaaatagatttgtgagcattggggctgaggacctatataacagcatcaaggttttagtttagggagtttttttcggataggagaataattctaggattttaaaattccagtttttatcactgttcatacacactgttgacgtaggataaaattcgttttctgcaatttcgtttcggcttcaatctacagtttcatttctactgattaatggaaggccaagtctctagcattgttttctcttgaggatcaagcaaaactctctttgaggttttgttattactattgaatactaatcagtttttcctcttcacccattactttgtatttgttgctattaatccatgcatgcttagtgcttgattaattgtctctacgcttaatttacgttcatgcttaatgatcagtttcgttcatgattaattggtgtatgtgttgtttaatcacataatgacagtcttatatgttaatttttgcttagtaatttaatttagggttggattaagtggttgaactgattaaggataaattctcgtaacctagaataaaagacttgcttatgaatcaaggggaaacatgttttaattatgttattttttaattcaaatttgcttgttgtttaatttacaaaatcaaacaacccccaaattcgttactattttattattatctgttatgaacgtttggttgaccattactcgttgggagacgacctaggatcacttcctagatattacatttttaatgtttatttgattcgggtacagcctcgatcaatagtatataagatatgacttgagtagactaagatgaaattattgtagatatattttttaaaaaaaatatttcatataattatatattcaaaaattggattaaaaattgttaatttaactaataataatttttgtttggctatattagtgtaaatcatctctaatccatacatttttttaatattatgctctttttattttctttttatatacttagtgctttaacaacttgaattcaatatgattttgtttatcaattatttttggatttgtacattacttctacgaaattttataagttttttttagttagtatttcactaggttttaaaataattaattaatcaaagacgtctttaagcaaacttttaaataggctcgtgggccaagtcagactttcatgtaagccgagccgagcctaaaaaaaagcctatgataggtaatgagccgagttcaagccttacatattcaattcaagctgaactcaagcctaataaaacttggcttggcttggctcatttccaccgctacgttacactactagaaaaatctatgcacctttcatgtccctaaatttatgaacaaaagattcaggtgtcgtttattgaatttgttttatatggagtgtaaagtcatatccaatactaataagtgtatgtttatataattctttttaaaataattactcttctttatttacatctaataaaattgttatcacattaatttttaaaataagctaaatgaagcatgtttcataagaaattaacttttactgtaattgttacattttttagtaacaaagggagatgggtgaaggaaaaaaatgaagataatgtctatgttgttcaaataacagtattaattgtattataatagttaatattaaaaaataaattagtaaatataacaacaaattgttgtgttggtgctatttattgtgcatcaaaatatgtaaaaataataattaacttgtaatttgtatagttggtatgggttgttttatctatcctggattttgttgtatcacacatataatcatttatatatatatatgggctattattgtcactaccaaaaatgctattgagactaccaaagcatttgaaattacttggttatccttagttccatttccccacacctcctatccttcccctctttacgttcagctactctccctctttacattcaaaaacagaatttaaataaggctctcaaatttgaaaaaaaaaaaaaagaagaagatagcaatgactacaaattgatcaacctgccaatacaatgataaaacttcggagtattctaagcaacactaaacagtgatactacctgagcgaaaagattgaagtttgaaccacgcatgatcaaggaaatgaaaataggcataccgccatgatctacaaatcagcaaaggagcaatcactatccagaatcccacaataaatccaattgtcatactgacaaaaaaccaattgactccatgcccatcacttccttcataactatgggttttcccattggagctgcagtttatgggcagtggtggaccacatagattgttgccgatgaagctggaggcatcataggtttgcaattgagttcctgttggaatatttcccttcaaatgattgtaagacaagtctagcatgctcagaaagctcaaatttgcaatgcttggagggatttcaccaaaaagttgattcctcgaaaaatcaatggactgtaatgatctcatattacctataccttgtggaatatgaccaatcaattggttgtgggacatgtttaaaaaattcaatccatttagatatgtgatttctcttggtatttccccaaataacttgttacttgacagatcaatgcttgttaccaaacccagaatgtttctgtactcatctcctcttcctttcagccatagtagcacactaactatactttccgtggaagagtaagacacagaatattttccttgagaatagatacgaggatctgtactttggttctttagtgtcatggcactcaagttaccgaaacagctcggtatattgccagacaaattgttttgtgcaaggtctaaaacctgaagatgactcatctgacatatttcatttggaatgtggccgccaaatctgtttgatcgaaggcggaggattttcacatttaagaggttttctccaacccatgttggaatacttcctgaaagattattttccccaaggtccaaggatatcaattggttattcttcttcaaactggtggaaatattccnnnnnnnnnnnnnnnnnnnnnnnnnnnnnnnnnnnnnnnnnnnnnnnnnnnnnnnnnnnnnnnnnnnnnnnnnnnnnnnnnnnnnnnnnnnnnnnnnnnnnnnnnnnnnnnnnnnnnnnnnnnnnnnnnnnnnnnnnnnnnnnnnnnnnnnnnnnnnnnnnnnnnnnnnnnnnnnnnnnnnnnnnnnnnnnnnnnnnnnnnnnnnnnnnnnnnnnnnnnnnnnnnnnnnnnnnnnnnnnnnnnnnnnnnnnnnnnnnnnnnnnnnnnnnnnnnnnnnnnnnnnnnnnnnnnnnnnnnnnnnnnnnnnnnnnnnnnnnnnnnnnnnnnnnnnnnnnnnnnnnnnnnnnnnnnnnnnnnnnnnnnnnnnnnnnnnnnnnnnnnnnnnnnnnnnnnnnnnnnnnnnnnnnnnnnnnnnnnnnnnnnnnnnnnnnnnnnnatccccgtgttagatagtccaacatattgaagttggttttgtgactgaatccacaatggaaagctgggacctaactgccatgatgtcacttccaaataggtaagttgaaaattaggaatccaattgggacccacttttaaagttaaattgttccccgatgcgacaaaatccgtcaagcttgtaagatttgcaagatcatcttccttgacaactccgtgaaaaagattgccgtcaatatgaagagataacaatttagagagtgatcgaagactttcaaatggatttccactgaatttattcatagagagatcgagatatcttaatgatgaaagttttccaaatgatctaggaagagcaccaccaattaagttgttggaaaaatatagccactcaatatttttaaatgccccaatatgatctgtcagattgcctgaaagtcgtgaactctgaactgcaagtcttgtgagtccatgggaaatacaaggagcaagaatttctaaaagttcattaacctgttggttgagtttgagatatgataaatctatcacccttaagttgcagagattacccaaagaagttggaatgtttccttcaagttgactatatgacaaatgaagttcaacaagagaagtcaaatttcccaaagaagttggaatgtttccttcaagttgattacctgataaatcaagttcaacaagagaagtcaaatttcccaaagaagttggaatgtttccttcaagttgattacctgataaatcaagttcaacaagagaagtcaaatttcccaaagaagttggaatggttccttcaagttgattacctgataaatcaagttcaacaagagaagtcaaatttcccagggcatcagaaatagttccatgtaagttgttgtccattaggttcaggaacttgagacgatgaagaccgtataagcaatcaggtatagaagatgagaatgaattgaaagacaagtcaagatttggatgaagtgtgaggttccgaataccaccaggaatcggaccgttgatttcattatatgataatgaagagaaacaagnnnnnnnnnnnnnnnnnnnnnnnnnnnnnnnnnnnnnnnnnnnnnnnnnnnnnnnnnnnnnnnnnnnnnnnnnnnnnnnnnnnnnnnnnnnnnnnnnnnnnnnnnnnnnnnnnnnnnnnnnnnnnnnnnnnnnnnnnnnnnnnnnnnnnnnnnnnnnnnnnnnnnnnnnnnnnnnnnnnnnnnnnnnnnnnnnnnnnnnnnnnnnnnnnnnnnnnnnnnnnnnnnnnnnnnnnnnnnnnnnnnnnnnnnnnnnnnnnnnnnnnnnnnnnnnnnnnnnnnnnnnnnnnnnnnnnnnnnnnnnnnnnnnnnnnnnnnnnnnnnnnnnnnnnnnnnnnnnnnnnnnnnnnnnnnnnnnnnnnnnnnnnnnnnnnnnnnnnnnnnnnnnnnnnnnnnnnnnnnnnnnnnnnnnnnnnnnnnnnnnnnnnnnnnnnnnnnnnnnnnnnnnnnnnnnnnnnnnnnnnnnnnnnnnnnnnnnnnnnnnnnnnnnnnnnnnnnnnnnnnnnnnnnnnnnnnnnnnnnnnnnnnnnnnnnnnnnnnnnnnnnnnnnnnnnnnnnnnnnnnnnnnnnnnnnnnnnnnnnnnnnccgctcaagtccaagtaattcaaatgctttaaatcagccaaacaaggacttatctctccaccaaagctccatctcctataaacttcctcatcgaagtgagagtagccatcatagtaatgatagaaaacagaatctgaggtgtggaggtgaagctgaagaacatggaaagtaaggttgtggcagaggactccataccagtggcaacagttggtattattatgattccaagaccaaagcctatttgaaggatcattcagattattcttaaacttcataagtgtctcacgctcacttgggatgcacacactctctctgcatggtaagctgaacaaccaaagctggacaaagacaagaatataaaaaatggaggaggaattcatgatcacacaagaatatatagaaaacaagtgtagttgttggttctgcatataaatcatcaaacttctattatttatactgctgccctgcctgtttttttcttcactttcattatttttttttaccttttttattgttgtgccaaatactaaaatattcttccattctttttttacgctggcctctttaaattatcgatttaattatccaattatcccgaattaattcttagaatacgaaattttttgtatttactgtatctatctccctttttaaaattcctatatacactaaattcataaaaaaaatcaaaattaataacaaaaaaatatgatttattcttgtgctgaatactaacataagaaacattcttttatataggtacagttttttttttacaaaaataaataagaattattttattttaatttactctataatactgcttaaatgaaaatttggtgtcattaaacttcaaattttaactattatttaatcaatccttccgttaaacttttgttacgtacaaaagtccaacatttttttaagaaaaaaaccaagtcttttatttcatcaaatttaatattaaattatcaaattttcaatattcaaactaaaaataatgtaaaagaaaattgtcttctaaatcatagcttacaccatcaagtcaatctcaaggttttccattttttcatcttgaacctttggacactccacaaagtccagccattatgttaaggtctgacttcttcaacttgaaccataggtcactgcattaccttcatatcaagttccctgtcattgacaacaaatgttgcgagttaagtcaagcaaggaaaaaaaatattattgatgaataaatcaattataggaaaagagtttactttaaagactattttggttaaaaaaatctaaaaaaaattatttcattccaagctagctatttaattttgatcaatttttcaattcacaaaataatattcttcttatatgtgaaaaagactaattaatcttcattgtcattaatgattgttgtgttgtctatttttaattgtttttttaatcataatattattttctttttattaaaaattaattagtgagatacaaagaagtttaacttgatctatcataattattgagatcatagtttttccttttataagtcttggtccaaatttctccatgtattgtagatcatatttaacttaaaaagtaaattagaagatctacaaagaagtgtgacatgttttttaaattataaaattatggtcctagctatttattgttagaccacaagttttcatatattaaattttttgtctaaatttcatttatggtgatagtttacgaatagtgatagaagacaaaaataaatattcaatttattgaaatatctaactcaattaattgatgaatacatcaattataggaaaagggtgtactttaaagactatttctattaaaaaatctataaaaaaattatttccttccaatctaattatttaattttaatcaatttttcagttcacaaaataatattctcttacataggaaaaaaaatactagatttaattatcatcaattggaaaagttattgtgtcatctatttataattgtattctaacttgaatattattttatttatcatataaaaattaattagttatataaaagaagtaaaaagaatattaatttttttttcaaaaaaaaaatcagtatcatattttatattttttacaagttatcaacttaaataaaaggagaaacataattttaatttccattttactttttaaataattgcaagtgtcaaatttaaataatcatgagaatactcacattcaatataatattctcaaaaaaaaaatccatacgataacttaaacaatctataaagaaatataatttattcttgtgccaaatactaaaacaagaaacattttttattttagtttaccgtatagaattgcgtaaatcaatgaaatttttattttaagaaaatattaatgatttttttaaaactttaagtagtttacatcaaagataattaaatttggcttaattagtcttcaaattttaactattattcaaatcaatcctttcgttaaacctgtatgtgttaagtaaacaacaaaaagtcttgtcttataaaattcaaacaatcctttcgttaaacctgtatgtgttaagtaaacatcaatatcannnnnnnnnnnnnnnnnnnnnnnnnnnnnnnnnnnnnnnnnnnnnnnnnnnnnnnnnnnnnnnnnnnnnnnnnnnnnnnnnnnnnnnnnnnnnnnnnnnnnnnnnnnnnnnnnnnnnnnnnnnnnnnnnnnnnnnnnnnnnnnnnnnnnnnnnnnnnnnnnnnnnnnnnnnnnnnnnnnnnnnnnnnnnnnnnnnnnnnnnnnnnnnnnnnnnnnnnnnnnnnnnnnnnnnnnnnnnnnnnnnnnnnnnnnnnnnnnnnnnnnnnnnnnnnnnnnnnnnnnnnnnnnnnnnnnnnnnnnnnnnnnnnnnnnnnnnnnnnnnnnnnnnnnnnnnnnnnnnnnnnnnnnnnnnnnnnnnnnnnnnnnnnnnnnnnnnnnnnnnnnnnnnnnnnnnnnnnnnnnnnnnnnnnnnnnnnnnnnnnnnnnnnnnnnnnnnnnnnnnnnnnnnnnnnnnnnnnnnnnnnnnnnnnnnnnnnnnnnnnnnnnnnnnnnnnnnnnnnnnnnnnnnnnnnnnnnnnnnnnnnnnnnnnnnnnnnnnacttttgttattaaacaataaaagtccaacattttattaaaaaaattcaagtcttctatttcatggactccatcaagtcttttattaaaagtccaacttttgttaattcaagtcttttacaaaattttgttaattcaacttttgttaattattacaaaatttggtattgaatttaactattatttaattcaagccttttattaaaagttcaacttttgttaatttaaatattattttgttaattaaaccatagccgactccatcaagtctatctcaaggtcctgtattttttcatcttgaacctttggacactccacaaagtccagccatgttatgttctctggcttcaacttgaaccatagcccatagggcacaaacaatatattaatgataaatacatcaattataggaaaagggtctaatttaaagactatttcagttaaaaaatctatataaaaaaagattatttcattcatatcttgctatttaattttgatcaattttttaattcacaaaataatattctcttatatatgaaaaaaaactagatttaatcgtcatttggaatggttgttgtgtgatctatttctaattgtattcaaacatgaatattattttctttatcatataaaaattaattggtgatataaaaagaagtgtgcaaaagaatattaatttttttctaaaaaaaattagtagcatattttgtattttttttacacgtcatcaacttaaataataggagaaacataattttaatttccattttaatttttaaataattttaattgccaaatttaagcaatcataaaatttatcataattttttttccttttcttttctatgaactgtcatttcttatctctacatgtgaatgtcatgcagacaaatgatgtccaagctccactttttccattcattgcaagttgtaagcagaatgtagaatgtacgtataataaaataatgagaatgccaactactagtacgtagtacttaattaaaacaaaagtatcaaaattagaacgaaaataactttgatgctgttaatacatgagtttaattttgatacacagtgtaaaaatttaaattgttaattaattagaaatcacctaatgatttgtaaaacaattannnnnnnnnnnnnnnnnnnnnnnnnnnnnnnnnnnnnnnnnnnnnnnnnnnnnnnnnnnnnnnnnnnnnnnnnnnnnnnnnnnnnnnnnnnnnnnnnnnnnnnnnnnnnnnnnnnnnnnnnnnnnnnnnnnnnnnnnnnnnnnnnnnnnnnnnnnnnnnnnnnnnnnnnnnnnnnnnnnnnnnnnnnnnnnnnnnnnnnnnnnnnnnnnnnnnnnnnnnnnnnnnnnnnnnnnnnnnnnnnnnnnnnnnnnnnnnnnnnnnnnnnnnnnnnnnnnnnnnnnnnnnnnnnnnnnnnnnnnnnnnnnnnnnnnnnnnnnnnnnnnnnnnnnnnnnnnnnnnnnnnnnnnnnnnnnnnnnnnnnnnnnnnnnnnnnnnnnnnnnnnnnnnnnnnnnnnnnnnnnnnnnnnnnnnnnnnnnnnnnnnnnnnnnnnnnnnnnnnnnnnnnnnnnnnnnnnnnnnnnnnnnnnnnnnnnnnnnnnnnnnnnnnnnnnnnnnnnnnnnnnnnnnnnnnnnnnnnnnnnnnnnnnntcggcttaattagtcttaaaatttaactattattaatcaattatccttcgtaaacctgtacgtgttaagtaaataacaaaatgtcttgccttataaaattcaaatattctattacttgcagtttgaacccataattaattttaaaatatcaattttttattattccaaataaaagaaattgtctagtctcctagacaaaccacttcccactccaccaaattcatatcaaggaccccacttttcccacttgaaccatagactactccataagtccaagtcaatgtccttcattttttcatcttgaaccttaggacactccacaaagtccagccaaccatatttaggtctctatcttcttcaacatgaaccataggtcactacattaccttcatatcaagttccatatcattgacaacaaatgtttagaattaagtaagcaaggaaaaaaattataaatgatgaatacatcaattataggaaaatgatctaatttaaagattatttcggttaaaaaatctatataaaaaaagactctttcgattcaatctaactatttaattttgatctattttttaatttaaaaaataatattcttcttatatgtgaaaaaaaactaattttcattgtcattaatcagaaagattgttgtgtcgtctatttctaattgtattttagcctgaatattatattctttttcattaaaaattaattagtaagatacaaagaagtgtaaaatgcttgtttaacttggtctaccataattattgagatcataacttttttcttttataagtattggtccaaatttctccatatattgtagatcatatttagcttaaaaagtaaattagaggatatgatataccaagaagtgtcgcatgtgtttttaaattatttatctatggccttagctatttcaaagttagaccacaagtcttcatatattaaagtctttgtctgaatttcatttacttgtgtggtgatattttaagaatagtgatagaagagaaaaataaatatataatttattgaaatatctaacttatgaagatttgcattcttaatgcataagcttttcagtttatatattattattatttggaaatattaatttgttgtgttaattgtctatttctaattaatttgaaaatgaatcttaattttttatcataaaaattagtatcatattttttattttctttacaagttatcaacttaaatactaataggagcaacataattttaatttccattttattttttaaataattttaagtgtcaaatttaagcaatcataaaaatactcacgttcaatataatatttttaaaaaataattcatgagaacacttaaataatctacaaagaaatataatttattcttgtgccaaataaacaacaaaaaaagtcttgtattattaaattcaagtattctattacatgcaatttgaacctataactaattttaaatgatcaaatttttattattcaaaataaaagaaaagaaaaaaaaattgtcttctagacaaaccacagacaactccaccaaatccatatcaaggtccccactttttcaacttgaaccataggccactccatcaaatctatgtcaaagtttcttatcattgacaataaatgttgagagttaagtcaagcatgaaaaaaaatacggtaaaatatatcatttctatccctataaaattttaatgtgctacttttttttatcctgagttaagtttggatgatagataattatcatgtattcttagattttggtgtctatccctataaaaaggttcttatatttacaatttttttatcttttggtcctcgaggggaagattcaattcacacataaacatgaacaaaattaataaaaatagggaagcaagctcaggtacaaatgaagtgtaatggaggtatgagacaaagccactacacattccattattcttgagtctgccaccgacctctgcaagcttagcatttgccaattgccatgatgtaatctccttcttgacagtctctcatcaagttggagtggtatcacagcattgaactaagttgatcgttccaatgggatgatggttttgattgctgcagataaagtgtgtgattgtgagtttctggtcccatgagttaaactacaacgactaaaaaaaatattgtcgtaactttaaggtcaaaaggataattaaaccttttatttttttattactttttttaacaacgggttatatatatgtagcagtttattctaaacaatggactacctgtgaaatctttgaattctatgtaagaaatgttatttcaaacttctcatcagtcttcatgtcaatgatggcatgctccatttgaattctatgtctaattaagctctcggtcttccgtttttgcaactttatttcgtagaaagaagccaaatttgaagatacaacatttgatactataactgtttggtgttttgaaaatctcactcacatatttccaaatgttacaaaagaatttgattcagtggtttttacgaattccttcctagccttttttaccaagtcagggaatttgcattgttgtgcatgatggctgccacaaggaccattgtaccaacccattagtgcaagtggttttttcttatgagaattgagaaacaaattatatatgtgttttataaagggaattctattatttttaattttgaacttgtaatgttttttgtttccctcacagaacaagtgatgttactcttgatcgacgccatacgtacgcatactttaatgctcttttttcacaccacttttatcttaatggtatctcaagttgacagtcataaattaaaatagctaactatagttgattagtagagacaaacagctcaaagataaagatctttaagccatcatttttttttccttttcttttctatgaactgtcatttcttatctctacatggaatgtctagaagttgaaaattacttgagctttctttacctactgctttccattttggcgaactgcttttctttctcataatgaactttccacttccaatgatggttgaacattaataattcttcatctattttgtctaaaaatttccactcacttttggtgagtggtgtgaatgtcatgcatacaaatgatgtccaagctccactttttccattcattgcaagttgtaagctccacttttgatcgacgccatacgtacgcctactttgatgctcttttttcacaccacttttatcttaatggtatctcaagttgacaatcataaattaaaatagctaactatagttgattagtagagacacacagctcaaagataaagatctttaagccatcattagtggtgttaatgtcatgcagacaaatgatgtccaagctccactctttccattcattgtaagttgtaagcagaatgtagaatgtacgtatatataataaaataatgagaatggcaactgctagtactacttaattagaacaaaagtatcaaaattaaaacgaaaataactttgatgctgttaatatatgagtttaattttgatagatagtgtaaaaatttaaattattaattaattagaaatcaccaaatgatttgtaaaacaattagtaaaaaagttataggaaatatatataattaattaattgcaaatgaaagtgtatttaaattaaattcttaattgacatatccttattgtgatattttgtatattttttatttaattgagacacgggtgtggttgtctaatataatagggatggttggtgaggaattttggaatgttagttggttttagggaagaaccaatgtcttgaaattccctcttcaccagaagcagttttattgtgtctttatcgaagtcatcttctccagagacttgcctttaactttgaagataggaaatagatcagtcaaacattgtttcagtttatttggattttttttgaaggacatgtgattttcaaagacttcttacaactcacaacctttggaatttctctatgcctggttaacccacaatttcggcgcctgttgcggttaggaacataggctagcaaaaacactaatcatttcaagagaaatgttaacacacttttctaatatattattttttatattaaaatttattaaaataaaaaattcagctgatctcatattttatttagcaaatttttctcatatattaagtcttagatttttaaaattataaaggtaaaactaaaatgttttactaaatgtattttaaagtaaattttatacacaaaaatattatgattttataaaaattgtttggtcaagggagacatattgagccctcctaactataagctaccctgagggtttctatctttctttttcccacttaatttttgactttggcagcaagggttaaacctaccacatctacataactatgtcttactttccaataagttacacctaaatagctaacatattcatcttgcccacgcacactatctttcgtaaacttttcacgatcatctttatatcatcaaattcatttaattaaatatacaattatcttaatattataagcaagtctctgtataatcatgtagtgtttctaaatagaatgagcctaaatcacacactcctgaaaaaaaaaaaagagtcatattgtcaaaatagccgtaaaaagatagaaatactaagttatgggcaagattttgatatactataaccttaatttttacaataaacctaaatgtctaaatatcataactcaaccatgtgacgaaatgacaatgtgttaattttgttgtgtcctcaggccgagggaattctcacacaccattccaaacaatttctaaggaattccacaacgtgtctatgcttcagacaacaataacgtacgaaataaacaagtagcatctaataacgttaaaataagcacacacatatatcgagccaaccaacgttggaggtagaagaacaacaataatatcaatatttaatttcatttagggttaattttttaggaactcaatgtaaaataataatttattaaaaaacaaacacaaaatttgagtatttattaagaataaaaacatatttaatttcatttagtgttttgacaatcacttagttacaccttatgaaattcacggattggtttggaggcttgactatcaaatttcatctcgcatcagattaaacatcgcattactataccatatagttatatgtgatttttttcccattcaattttatatttagctacacattaaaattaatttataccaaattttttgcatataggttttttttagtgaatcaaattcttttttaattcaaattgggacattagttttcgtatccgttaagaataattgatacctaatttaaataattgtattaaattctaattatcaaaaaatcccgtatttattatcataaaaatatttaacaatttaatcattaatttcgtagtataattgatactggacaactaatatttattgcacttaatttcatttgataataactgatatttcttcaatcgcgtatcatttgttgcaaaacgaacatccaatatcattggagaacaatgttgatgtaacgattaattcattgataatcacatgaatgtattaaatccaggatattaaatttacaaataattttttgtttttcaattatattttaacaataattaagaaataaatctaaatcattctacatttacatttgtttataggtatttgggatattggccggagatgctatatgggaatctaaattttgcttaacacaaatgtggtatgcaaggaaaaatcaaattgaaatatttttaaccaccacttcaaatttttaaaagatttgtttcaaaataaggatatgaagaacaaattgtttttagagaacatttcctccatgatgttttcctttcctttaggagaaaaaaaaataggcatttccaaaaataatgaaagtgcatttatataatgttgtttatatagagaagtctttgaaaatataagtcaagtactatatattactacaaactattctgtatcatatatctcttatatattttgatataaaatatttattaatttttttttttaatttcttagtaacatgtgcatgaaagtcaaaccaaaccgaatctgaggatttatgtgacatttaacttttatcaatttttgccctcaaagatcacactctaatcaagtaaaatagagacaaatttaacagacaatgactaaattaaatatggatttggctattgccatattaacctcggagaggtaaaagatcattaataatagtaatagaaacagtagacttgtaagcataaagttgttcctaggaaaacaataagccacaaagaaatccccaagaatgtattcattcctaatccacaaagaaaagcccgtatgcgcttactgtgttgtcaatcccagagggctttccatgaatgatcttctccaaggaattttctataacaaaccaaagaactaaatataacaagctctcaacattactgaaatattctcaaaggaaagatctcaaagggatggcaagcctagtttttttttttttttatcatagaaacattatagtttctccctagcaagaataatttgtgatggattgaaatttcctttatgtatctatgaaccagtggcataaagtttgtttttaagcacacatgacatgacgatacctagctttggattaccatgtgacaaaaaattactttcctaactttagtttccccgaaaggtaaaattaaccaaatctgaaaagcgtttcgtgtaatattggctacgcatgattaattaacttctgaaacggccagctacttcataaccttttgatgtcattctccccaacaaaaaacaacttgttacctagcaacagcttgcttgcttgctttctcacgcacttagtgaccctctatgcatgtgaaataaattgttataacctttattgtttttcatcaatattaccaaaatttccttaaaatgttcaatatttcgtaaccttcataattaattcaaaattctcaaaagattagtatatgaccttttttcttgtttgtactaggagaggaataaatgaaaaaaaaatcagaaatttgtggattgctatttgctcatatgatgtgtctattagttctttgaaatttgtattgatcatatttatttttaccttttaatagatatattgtgctgtcatcccaagagaaggatcaaacattgatgatgcagaggtgctaagatattgcaagaagaatcttgcatctttcaaagtccctaaaaaggtcttcattactgattctttgcccaagactgccaccggaaagattttgcgtcgtcttgtggcaaaacactttgtctctcaaatttgagcaacccaagtcctacttttgaagcctccatacctggccatacatagttggagtccacacacataaatttcaacaataatttggcaacttggcatttaagaggagggtaattctgcaaatggtctttcatacaggatacaatagattgtagttttgaatattcacgtcaaatgttcacaatgtaatgttttcaatgttttatagatcttaaataccagtagcagacaagcatgtcatgcttatgcttttttgctatcgtgctcctgttccttgccactggtcttgatgaagccaagcattgtctctttgccttttaagttgtacataattgcaaaacggatacatgtaaaagaataaatcttattaaaggtaaggttgattttaaagtgggcaagaatgcatccatgatcttaagtaaataaaattcaagcgaatatgtggtttggattagagaatagtattatccagtgcacactaaattggagagattcccaacatgtggtttcaaaactcaagagtacttaccaactatttcaaatttaatctacgtgatctagctaatgttttctatcagagaattacaactagttgatctcaagtacaaaactatactgaatatgcaaatctttacatccaaaaactgaatttaaataaggctctcaaatttgaaaaaaaaaaagatagcaatgactacaaattgatcaacctgccaatacaatgataaaacatcagtgtattctaagcaacactaaacagtgatactacatgagcaaaaagattgaagtttgaaccacacatgatcaaggaaatgaaaataggcataccgccatgatctacaaatcagcaaaggagcaatcactatccagaatcccacaataaatccaattgccgctctgacaaacaaccaattcactccatgcccatcacttccttcataactatgagttttcccattggagctgcagtttatgggaagtggtggaccacatagattgttgccaataaagctggaggcatcaaaggtttgcaattgtgttcctgttggaatttttcccttcaaatgattataagacaagtctagcatgctcaaaaagctcaaatttgaaatggttggagggatttcaccagaaagttgattcctagaaaaatcaatggactgtaatgatcccatattaccaatgccttgtggaatatgaccaatcacttggttgtgggataagttcaaaaagttcaatccatttagacttgtgatttctctaggtatttctcctaatagtttgttacttgacagatcaatgcttgttaccaaacccagaatgtttcggtactcatcttctcttcctttcagccatagtagcacaccaactatactatatccagaagattaatgtctactattttgtgctacagaatagatacgaggatctgaactttggttcattagtttcatggcactcaagttaattactgaaacaacttggtatattaccagacagattgttttgtgcaaggtctaaaacctgaagatgactcatctgacatatttcatttggaatgtgaccgacaaaactgtttgatcgaaggtggaggattttcatgtttaagagttttctccaacccatgttggaatacttcctgaaagattattttccccaaggtccaaggatatcaattggttattcttcttcaaacaggtaggaaatattcctgagagtgtgttgttaccaatttgtaaagactgcagctcagacaaggaacccatggatgagggtaagttcccaacaaaatggttgctttgtaaattcacttccactagaaatggccaattaattcaacaatcaggtatttctcctgacagattatttgatgcaagattgagaatttctaattgcattggcttgtcctgattgttacataaaaaatcttgcatggattcagagaatgaattggttgaaaggtctaacccatacacatcatttgaaagatagggtaatttaccacataagtgatttgtgcttagatcaacagttgggatagatattggattttttaatgtagtcacaagctcaccatggatatgattatgagagtggtttaaatacaaaacctgagattgtgcttcccacatctgtgtaggaatagaatcaataatccctgtgttagacatgcctaaatatttaagttttttttgtgactgaatccacgatggaaagctgggacctaactgccatgatcccacatccaaataggtaagctgaaaactaggaagccaattggaatcaacttttaaagtgaaattgttccctggtgcatgaaactccttcaagcttgtaagatttgcaagatcatcttccttgacaactccttgaaaattattgccatcaatacgcagagatgacaatttagagagtgattcaatactttcaaatggatttccactgaatttattaatagacagattgagatatcttaatgatgaaagttttccaaatgatcttggaagagcaccaccaattaagttgttggaaaaatctagcatgtcaatatttttaaaagccccaatttgatctatcagattgcctgaaagttgtgaactccgaactgcaagtgttgtgattccctaggaaatacaaggagcaagaatttctaaaagttcattaacctgttggttgagtttgagatatgataaacctatctcccttaagttgcagagattagccaaagaagttgaaatggttccttcaagtagattatatgacaaatcaagttcaacaagagaagtcaaatttcccagggcatcagaaatagtcccatgtaagttgttgtccattaggttcaggaacttgagacgatgaagaccgtataagcaatcaggtatagaagatgagaatgaatttccagacaagtcaagattttgaagaagtgagaggtttcgaataccgccaggaatcggaccttggatttcattaccccgtaattgaagagaaacaagtttcttcaatttgaatatccacttggggacaaaagaaatggcaggggaataactagtaacggaaagatggagagtttgcagagatgagaagttgagcaaggatggttcattatagtgagggagtgtgcatcctgacaaagataggtgggtcaaagaaggaagagattggagagtgtgtagccaatgaaatgctttggataggtttgcatttcttaaacttcataagtgtctcacgctcacttgggatgcacacactctctctgcaaggtaacctaaacaaccaaagctccacaaacacaacaatataaataatggaggaggaattcatgttcatgcaacgcatatatgaaacaacttaattgtataagtgcttcttgcttctgcatattaaacttacttctttctattatttatactgccgcaactgcctttctttcttcattcttatttcttttttaattcacaaaatgatatttttcttatatatgaaaaagggctagttttcatcgtcataatttgtaataggttgttgtgtcgtctattaatttctaattgtatttgaatctagatattgttctctttttaatataaaaattaattagtgagatacaaagaagtgtgaaatataatgcttgtttaacttggtctaccataattacacagaccataattttttcttttataagtcttgcttcaaacttctccatctccatgtatcgtagctattttattgttagactaataatgcgtatatagaatataccatagaagggtttgcatttaaaattttattccactaatggtggtggttgcagaatgcacaaatatgtagaggtatatatgtctacaacgagccatttaggattaaaagtgtctaatcacaccaccattattttgcactagtttattttattttggtttaactacccttttagtcttgatagttgtgataatttttctttttagtccctataattttaaacatttattttggttcctatatttataattttttaaccttttggtcctcagcaggaagtttcaactcacacataaacatgaacaaaattaataaaaatagggaagcaaactcaggcacaactgaactgcaatggaggtatgggactaaaccaatacacattccattattcttgagtctgccaccgacccctgcaagcttagcatttgccaattgccctgatgtaatctccttcttcattgtcactcatcaagttggagtggtatcacagcattgaactaagttgatcgttctaatggtagtttgtgccttcatggttgggatgatgttgcaggttccggtttgttgttgagggaaaagatgatcagccacgtctcgtgtgtgctaagagagtgcctttgccctctccacaaccttagtttcaacaattgacgttagtcgaaacttgatggtgagaatcaaaagagtaaaaaaaaaaatgtgtttaattcataatatatattcgaccatttgatctttgacaaattttttcttcaaagaaaatctttaatatttaaaaaattttattttaaatctccatcgttaaataatgacgtaccttcaatatttatttgaaacttgtcttccaccccgtctccctcaagctctccacattcacacacatatgaacactaagctctagacaaaaataaataaataaataaccacgagaaataatatataactctttagtggaataaataaataaacactaagctctccacattcacacacatgaaatgatccagactaagttaacaaactaaatggtcttcttccgtgagttcacaatgaaaccacagaatttattttcatccactagtttccttcccaaatgttttctaaaacataacacactacagaaccttctaataatttttttttttaaaaaaaaaaccaacattttacatgtagcaccacaacttaacaatttctagctacaaccctgctctgtatactcattctaaacttgttccatagactataatataatctatctccactcattcattcatcaagattgaaaaatggattcaaatgcttgtctaccacacttgctagtgttagcaataacattggtattggttagtcatgcaatgggagattcagctcaagacaaacagagatgtgcagaatccctaacaggtgttacaacgtgtctgccatatttgggtggtgacacgaaagcacccacagcagattgttccagtggtctcacacaagccatgaagaccaacaagaagtgtgtctgcgttattctcaaagacagggatgatcctgatcttggcttaaagattaacatgacaattgctgctggtctcccttctctttgcaaaacacctgataatttctcacagtgttctggtatgttcaatttcaaattaagtcttcctttttttcttaaagaacactacactacagtgttatgtttccatttcctatgcaatgaatgatctataagtcttgttagtggtggccatataaaaacttatgtttttatctttcattgtttgatgataacctgtttttaataggaaaaaaaaagtctttatttctattttcaaaaactatttttagttttcaagatacaactaaacaagttcttcagactgtttggtggagaatgatgtgagacacagaatgtggaattgagagggaacttgaacaagattaaaacagaagaagcagagaaaacgttttcccgatgttttttattttttggattttagaacacttattttggatacgattctccaaacttatatattttggaagagaaattgattactaagtagtctaaaattattttataaaacagtttcttaactgagaatactcagaccctaaatcttccaattttagtatatttctaaaaaaaatcagaatatttgtggtctaagttttatcattatcaagcctttcattttccttaaagaacaaaagagtgtcacattccatttactatgtaatgaatggtcaacaagtcatgtacttcaaagttttctacttttctcattcgtaactggacaataacacattttaaaggggaaaacaagggcatctaaatctgccaattttactttgtttgtgtatctattacctctgagttttcaactccgaaagttaaaaatatttgaggtttgattttttctcaagaaattcttgtttgaaatgatttgagcaacccttctgcacttggatcctaaatcacctgaagctcaagcttttaatcaaattgatcagaaatccaatggtggttctatcagtccttcgcccacttcttctggtagtgatcctttcaacaaaatatttcatttttggaatttattttttacattgacttttgagtttcaatggtgtagtactaaattttgcatttatttttaatgtgttattttgtgcattcagttgaaggaagttcccagaatggtagaaagcaggggacagatgaaacggccacagctaagaatagtgcatcttatatcgggaagagattgttagaaagtttggttgcagttgcagggcttctaatttggttttcatgagcttaactcaaatattacctatatattaccattttcatatcacgttaaaatgtaaaccattgatgagttgatagtgtaaaaattatttacactcttgagtgtattaaatctctgacagactcacaatagacattattgcaaaaccttattggagatttatttttgtgagcattttgcctttaatctcatacaactatatgcttgttacacaaatcttattgttcagtcctaaaagtcttttatctctaataagtaataacgacttgttgtaatagaaattaaaatcttattattttttttaattacacttgaggatgattttggtatcccacttttcaattgctccgttcgttcccatattttcaaattttacaaatttgattcattaattaactagatatccaatctttgatggagatgtttatgaggctatatgtgaaaatagagtgttggcatggatctcaacttttaattcctcaattttggttgccatatttttaaaattatgcgattttggagcaggagtgttgtttttcaaatataccaatactactcagggattatgcatgggaatcttcttacatatatactactatgaattatgttgtctgcttaaagttgtagcagaaaaatacaggtaattttgaaggaggcgaaatgcatttcagaagagaataatagagataatgtggaacatttaccttgtagcatttccattttgaaaaataataagtttctaacattacaaaattaacaaactaattttttttctcgtaaagtctaaaactcataattcgtcaagcatgatatggtttctttagccaagtacaagataatctagattctacttctatcctcccaagatattctaagaatgaatgagttaagttgaatatggaaaaaaagaaaaaaatattcattaagatgttatggtttgattatcccaataacttttctcccatgattcaacttgttgaattgagctttcctttctctgtaatgttgcatacaaagttggaggatcaaaaggggcaggcatggtgcaagggtcggtatttgcaggaaccttgaccaatgattccatcataaatttctttactgatccttctgctccacaaaccattgactccacacatagttctgtagcattagcacttatggagggtttgtatctgaagagtttagcatatgaattcaggagatgaaaaatgtagtcgtacacgtagtccatctttacctcttcttgaatgaaatcactcgccaccttgccaatttgatgtgcctgataaatttcacaaatagaaatgaaatggaacaagttaaacattgagaaagtgttgtttaatttatttatttcctccaaaaagttttgcattagtaggtaattgttgtttattattcgtataagctcacattttagtatatagtatatctgcatatggattgtgcaataatgtaaaggatgaaacatgttaggcttttgggccaaggttattatattaaatcttaaaaggtactattaaacattgatttgcttataactatgtagtcaggtttgaccctgattaatattaagtgattcaccattaaatcaaatattccgaggcctcggtgaattcttttaggattaattaacttggtaagaattatattctagccttagtgaagaagcaaaacttcaagattaccctttgcttgtgattattgccccaatccacagcaaacttaatggatctgcacttgtcatcgtcattggaatggttgttgtatcaaattttcaatattcaaactaaaaataatgtaaaagaaaattgtcttctaaatcatagcccacaccatcaagtccatctcaaggtttttcattttttcatcttgaacctttggacacgtattccacaaagtccagccatgttaaggtcgggcttcttcaacttgaaccataggtcaatgcattaccttcctatcaagttccctgtcattgacaacaaatgttgcaaattaagtcaagcaaggaaaaaaaaatataattgatgaataaatcaattataagaaaagggtgtactttaaagactatttccgttaaaaaatctatatataaaaaaagattatttagtttcaatctagctatttaattttgatcaattttaaaattcacaaaataatattctcttatatatgaaaaaaagactagatttaattgtcatcaattgaaaaggttgttgtatcacgtatttctatttgtattcgaacctgaatattattttctttatcatataaaaattaattagttataaaaaaagaagtgtgaaaaagaatattaacttttttttctaaaaaaaatcagtatcatattttgtattttttacaagttatcaacttaaataagaggagaaacataattttaatttccattttactttttatataattgcaagtgcaaaatttaaacaatcataaaaatactcaggatcaatataatattctcaaaaaacaaattcatacgataacttaaacaatctacaaagcagtacaatttattcttgtgcaaaatactaaaataagaaacattttttattgtagtttacagtatagaattgcttaaatcaatgaaaattttatttcaagaaaatattaatgatttttttaaaactttgagtaggttacatcaaaggtaattaaatttaacttaattagtcttcaaattttaactattatttaaatcagtcctttcgttacacctgtgttaagtaaataacaaaaagtcttcattataaaattcaactattctattacttgcaatttgaacccataattaattttaaattatcaaatgtttattattcaaagtaaaagaaatgaaaacagagaaaccactagtcactccaccaaatccatatcaaggtccccactttttcaacttgaaccataggccactccatcaaatctatgtcaaagtttcttatcattgacaacaaatgttgagagttaagtcaagcatgaaaaaataggctaaaatatatcatttctatccctataaaattttaatatgctacttttttatcctaagttaactttgaatgattgataattatcatgtatttttagattttggtgtcattttgggatattatgtgatatatgtcctttctgtttttttattgccataaactaatcttcttttctgctggactttaatgtaattggttcttttttcatgtaatgactactttttattcaataaagcattgtaattgtttcccttatgtgtctaatatgtgtttttggcttgatcacctatttttttttttattcaattgtaattgaaaaattcctttgggctacgaattgaaagaacacctaataatttttatgtctaggaataagataaaaagaattgagcatcaataaacactttatcttaatgcacatcatttggttatattaattcaagggattgatataatcaagggatttaggtcttttcacttaaggaattaaagttaatatggtggatttatgataatataacctttattaaatatgaatgtgtagtgattacatgatagaaacttcaatgaaattaaaccccaatgattttttcattgatttcatctcaatttactttgcatacactgggtgtttgttaaattatatgttaaattataatatctgggtgtttaaaactgccaaaataataaaaaaaaagaaatcaaagaataaaatccaagctttcttgaaaatcattactttcgacttaagaaagaaaattgtttcttgtttcttgtgacacccctctacccctgacatatatataaaataaataaaaaacatataaaaatataaaatttaattaaatcaattttattcacatcccataaacaaatccacatggtaaaaaggttcatattcacttcactattactaaataaaacttatcagaaacatttcaagctcaaaaaatcatgcaatttaaacaaaaacgcatgtccaatgtcatatcatatcagagcattgtttcttgtcgtgctccatcacaaagttcctcaaagtaatctacatagtcatctattcccacgaatacaagattcgaaatcatctcaggattcaaacacaaacagtcacagagagtgagttatcacattcctaaccagatagagataaacaaaatcatatctatttaatataagtataataagttcaacttaatacaatctacgtcacttcacaactttatcatttaattttttttttcaatcataaatcacattacacatgaatcacacgcttgaatcaagacgtgataatactcaccaatttcataataaataattcacatgcgttatgcaacaattatttcaattataggaatatagtctaatttaaagactatttcaattaaaaaatctatataaaaaatattatttccctaagaatcaatttttgtgttattcacatgtgttatgcaacaattatttaaagactatttcactttattttatttcccccaacatcaattgttgtgttattcatactgttaaattagtccgataactaccctgtcgatcattgttagtcttgtttccaccattgtgcggagtacgtatatactattactttatgattaaacgtgttacttaaattgcagataaaaactctttataatgaagtacaattgtttataactacaacaattatattgagtcaatttaacactcatcaaaggcagaaaagctttactttaagattagacagaggctcataccaatcatggcggtggttataattacacacatcagcaactgtaaaagatcttgcaccgccacagaaaaaaaaaatgcttgatgcacatcggataaactcactcaagttatatgtattaatagtgtaaaagagagactgaatattaaatgataaaaatataaaataattgttttgtattggcagagtacacatatatatgcccaaatgtagattcaaagttcaaacattttgggcctagatcatccctcctagtcatagccatctgaattggatcgaccccaccccaaggtttgtgttgcatcacttgcatgcattcacccaccacagttgttgttatagttttctcgtgatttttgtattggaaaatactatggacaaatataattgatacagtcataattaattattgtcatgttgcaattacaaagactcctcaaagaatatgtttagtaaatcatgatcaagtagaaattgcaatggcaaactgttttttaaaatcttattagtcagttgtataaacccaaatttagatatattcaggtatgtaatatttgccattttagtgctctgtttggaaatttgcgtgtcgaattgttttttttatacgtacctgcacaacactctttagccaaataccactgtgcatggaggaatctgtcctgaaaggagtatagaaccagaaacaatatgcgtggtggtatctatcattctgaaaaagagaaaaagtgggatacgtacaatagtaggaatgtgacactcctagaaaaatgtatgcacctttcatgcccctaaatttatgaacaaaagattcaggtgtcgtttattgaatttgttttatatggagtgtaaagtcatatccaatactaataagtgtatgtttatataattctttttaaaataattactcttctttatttacatctaataaaaatgttatcacattaaaatttttaaaataagctaaatcaagcatgtttcataagaaattaacttttactgtaattgttacattttttaatgacaaagggagatgggtgagacggtgaaggaaaaaaaaaagaagataatgtttatgttgctcaaataacagtattaattgtattaaaatagttaatattaaaaaatatattagtaaatataacattgttgtgttggtgctatttattgtgcatcaaaatatgtaaaaataataattaacttgtaatttgtatagttggtatgggttgttttatctatcctggattttgttgtatcacacatataatcatttatatatatatatatgggctactattgtccccacacctcctatccttcccctctttacgttcagctactctccctctttacatccaaaaacagaatttaaataaggctctcaaatttgaaaaaaaaaagaagatagcaatgactacaaattgatcaacctgccaatacaatgataaaacttcggagtattctaagcaacactaaacagtgatactacctaagcgaaaagattgaagtttgaaccacacatgatcaaggaaatgaaaataggcataccgccatgatctacaaatcagcaaaggagcaatcactatcaagaatcccacaacaaatccaattgtcatactgacaaaaaaccaattcactccatgcccatcacttccttcataactatgggttttcccattggagctgcagtttaagggcagtggtggaccacatagattattgccgatgaagctggaggcatcaaaggtttgcaattgagttcctgttggaatatttcccttcaaatgattgtatgacaagtctagcatgctcagaaagctcaaatttgcaatggttggagggatttcaccagaaagttgattcctcgaaaaatcaatggactgtaatgatctcatattacctataccttgtggaatatgaccaatcaattggttgtgggacatgtttaaaaaattcaatccatttagatatgtgatttctcttggtatttcccctaataacttgttacttgacagatcaatgctagttaccaaacccagaatgtttctgtactcatctcctcttcctttcagccatagtagcacactaactatactttgcatggaagagtaatacttaccatattgtacttgagaatagatacgaggatctgtactttggttcattagtgtcatggcactcaagttactgaaacagctcggtatattgccagacagattgttttgtgcaaggtctaaaacctgaagatgactcatctgacatatttcatttggaatgtggccgccaaatctgtttgatcgaaggcggaggattttcacatttaagagcttttctccaacccatgttggaatagttcctgaaagattattttccccaaggtccaaggatatcaattggttattcttcttcacactggttggaaatatccctgagagtgtgttgttacgaatttgtaaagactgcaggtctgccaaggaacccatggattggggtaagttcccaacaaaatggttgctttgtaaatttacatccacaagagatgtccaattcatccagcaatcaggtatctctcctgacaaattatttgatgcaagattcagaaattgtaattgcattggcttgtcctgatcgttacataaaaagtcattcatggattcagagaatgaattgcttgaaagatctaactgaagcacatcacttgaaagatagggtaatttaccacacaagtgatttgagcttagatcaatagttgggatagatattggattctttaatgtagtcccaatctcaccatggatatgattacgagagaggtttaaatacaaaacctgagaaagtgcttcccacatctgtgtgggaatagaatcgaaaatccccgtgttagatagtccaacatattgaagtttgttttgtgactgaatccacaatggaaagctgggaccacctaactgccatgatgtcacatccaaataggtaagttgaaaattaggaatccaattgggacccacttttaaagtgaaattgttccccgatgcggcaaactccgtcaagcttgtaagatttgcaagatcatcttccttgacaactcggtgaaaaagattgccgtcaatatgaagaaataacaatttagagagtgatccaagactttcaaatggatttccactgaatttattcatagagagatcgagatatcttaatgatgaaagttttccaaatgatctaggaagagcaccaccaattgagttgttgaaaaaatctagccactcaatatttttaaatgccccaatatgatctgtcagattgcctgaaagtcgtgaactctgaactgcaagtcttgtgagtccatgggaaatacaaggagcaagaatttctaaaagttcattaacctgttggttgagtttgagatatgataaatctatcacccttaagttgcagagattacccaaagaagttggaatgtttccttcaagttgactatatgacaaatgaagttcaacaagagaagtcaaattacccaaataagttggaatgtttccttcaagttgattacctgataaatcaagttcaacaagagaagtcaaatttcccaaagaagttggaatggttccttcaagttgattgtttgataattgaagtttaacaagagaagtcaaatttcccaaagaagttggaatggttccttcaagttgattagctgataaatcaagttcaacaagagaagtcaaatttcccaaagaagttggaatggttccttcaagttgattacgtgataaatcaagtccaacaagagaagtcaaatttcccaaagaagttggaatggttccttcaagttgattatgtgacaaatgaagttcgacaagagaagtcaaatttcccagggcatcagaaatagtcccatgcaagttgttgtaacttaggtccagatacttgagacgatgaagaccgtataagcaatcaggtatagaagatgagaatgaattttgagacaagtcaagattttgaagaagtgtgaggtttcgaataccaccaggaatcggaccttggatttcattacccaaaaattgaagagaaacaagtttcttcaatttgaatatccacttggggacaaaagaaatggcaggggaataactagtatgggaaagatcgagagtttgcagagatgagaagttgagcaaggatggttcattgtagtgagggagtttgcatcctgacaaatataggtgggtcaaagaaggaagagattggagagtgtgtagccaatgaaatgctttggataggtttgcataactcaaatcaagatattcaagcttccacatacttgatacccattctacattttcagctaacagatcataataactacctccgaggtcaagatagaccaaattggagagattcccaatctgagatggaatcttccccatgaatggagtataagagaggtcaaggtgagtcaaggaggtcattgtcccaaggaaagaaggaattgccataccttcaaaatcattgtcgctcaagtcaagatatcgaagcttagagagattcccaatctgaggaggaatcttcccatagaatccagtataaagagaggttgaggtgagtcaaggaagtcattgtcccaaggaaagaaggaattgacataccttctccaagaaaataattgccgctcaagtccaagtaattcaaatgctttaaatcagccaaacaaggacttatctctccaccaaagctccatctcctataagcttcctcatccaatccacggacgactccataccagtgttgaggtgaagctgaagaagatgggaagtaaggttgtggcagaggactccataccagtggcaacagttggaattattatgattccaagaccaaagcctatttgaaggatcattcagattattcataaacttcaaaagtgtctcacgctcacttgggatgcacacagtctctctgcatggtaagctcaacaaccaaagctggacaaagacnnnnnnnnnnnnnnnnnnnnnnnnnnnnnnnnnnnnnnnnnnnnnnnnnnnnnnnnnnnnnnnnnnnnnnnnnnnnnnnnnnnnnnnnnnnnnnnnnnnnnnnnnnnnnnnnnnnnnnnnnnnnnnnnnnnnnnnnnnnnnnnnnnnnnnnnnnnnnnnnnnnnnnnnnnnnnnnnnnnnnnnnnnnnnnnnnnnnnnnnnnnnnnnnnnnnnnnnnnnnnnnnnnnnnnnnnnnnnnnnnnnnnnnnnnnnnnnnnnnnnnnnnnnnnnnnnnnnnnnnnnnnnnnnnnnnnnnnnnnnnnnnnnnnnnnnnnnnnnnnnnnnnnnnnnnnnnnnnnnnnnnnnnnnnnnnnnnnnnnnnnnnnnnnnnnnnnnnnnnnnnnnnnnnnnnnnnnnnnnnnnnnnnnnnnnnnnnnnnnnnnnnnnnnnnnnnnnnnnnnnnnnnnnnnnnnnnnnnnnnnnnnnnnnnnnnnnnnnnnnnnnntaaacttaaattttaactattatttaatcaatccttccgttaaacttttgttgcgtacaaaagtccaacatttttttaagaaaaaatcaagtcttttatttcatcaaatttaatattaaattatcaaattttcaatattcaaaactaaaaataatgtaaaagaaaattgtcttctaaatcatagcttacaccatcaagtcaatctcaaggttttccattttttcatcttgaacctttggacacttcacaaagtccagccatgatgttaaggtttgacttcttcaacttgaaccataggtcactgcactaattaccttcatatcaagttccctgtcattgacaacaaatgttgcgagttaagtcaagcaaggaaaaaaaaatattattgatgaataaatcaattataggaaaagagtttactttaaagactattttggttaaaaaaatctataaaaaaaattatttcattccaagctagctatttaattttgatcaatttttcaattcacaaaataatattcttcttatatgtgaaaaccactaattaatcttcattgtcattaatgattgttgtgttgtctatttctaattatttttttaatcataatattattttctttttattaaaaattaattagtgagatacaaagaagtttaacttgatctatcataattattgagatcatagtttttccttttataagtcttggtccaaatttctccatgtattgtagaccatatttaacttaaaaagtaaattagaagatctacaaagaagtgtgacatgttttttaaattataaaattatggtcctagctatttattgttagaccacaagttttcatatattaaagtttttgtctaaatttcatttatggtgatagtttaagaatagtgatagaagacaaaaataaatattcaatttattgaaatatctaactcaattaattgatgaatacatcaattataggaaaatggtgtactttaaagactatttctattaaaaaatctataaaaaaattatttccttccaatctaattatttaattttaatcaatttttcagttcacaaaataatattctcttatataggaaaaaaagactagatttaattatcatcaattggaaaagtaattgtgtcatgtatttataattgtattctaacttgaatattattttatttatcatataaaaattaattagttatataaaagaagtaaaaagaatattaactttttttctcaaaaaaaaaatcagtatcatattttatattttttaaaagttatcaacttaaataagaggagaaacataattttaatttccattttactttttaaataattgcaagtgccaaatttaagtaattatgagaatactcacgttcaatataatattctaaaaaaaaatccatacgataacttaaacaatctataaagaaatataattcaccaaatccatatcaannnnnnnnnnnnnnnnnnnnnnnnnnnnnnnnnnnnnnnnnnnnnnnnnnnnnnnnnnnnnnnnnnnnnnnnnnnnnnnnnnnnnnnnnnnnnnnnnnnnnnnnnnnnnnnnnnnnnnnnnnnnnnnnnnnnnnnnnnnnnnnnnnnnnnnnnnnnnnnnnnnnnnnnnnnnnnnnnnnnnnnnnnnnnnnnnnnnnnnnnnnnnnnnnnnnnnnnnnnnnnnnnnnnnnnnnnnnnnnnnnnnnnnnnnnnnnnnnnnnnnnnnnnnnnnnnnnnnnnnnnnnnnnnnnnnnnnnnnnnnnnnnnnnnnnnnnnnnnnnnnnnnnnnnnnnnnnnnnnnnnnnnnnnnnnnnnnnnnnnnnnnnnnnnnnnnnnnnnnnnnnnnnnnnnnnnnnnnnnnnnnnnnnnnnnnnnnnnnnnnnnnnnnnnnnnnnnnnnnnnnnnnnnnnnnnnnnnnnnnnnnnnnnnnnnnnnnnnnnnnnnnnnnnnnnnnnnnnnnnnnnnnnnnnnnnnnnnnnnnnnnnnnnnnnnnnnnnnnnnnnnnnnnnnnnnnnnnnnnnnnnnnnnnnnnnnnnnnnnnnnnnnnnnnnnnnnnnnnnnnnnnnnnnnnnnnnnnnnnnnnnnnnnnnnnnnnnnnnnnnnnnnnnnnnnnnnnnnnnnnnnnnnnnnnnnnnnnnnnnnnnnnnnnnnnnnnnnnnnnnnnnnagccgactccatcaagtctatctcaaggtcctgtattttttcatcttgaacctttggacactccacaaagtccagccatgttatggtctctggcttcaacttgaaccatagcctgggccacaaacaatatattaatgataaatacatcaattataggaaaagggtctaatttaaagactatttcagttaaaaaatctatataaaaaaagattatttcgttcatatcttgctatttaattttgatcaattttttaattcacaaaataatattctcttatatatgaaaaagctagactagatttaatcgtcatttggaatggttgttgtgtgatctatttctaattgtattcaaacatgaatattattttctttatcatataaaaattaattggtgatataaaaagaagtgtgaaaaagaatattaatttttttctaaaaaaaattagtagcatattttgtatatttttacacgtcatcaacttaaataataggagaaacataattttaatttccattttaatttttaaataattttaattgccaaatttaagcaatcataaaatttctcatgttcaatataatattctaaaaataaaataaaaatattcatatgaggtcttccgtttttgcaactttatttcgtagaaagaagccaaatttgaagatacaacatttgatactataactgtttggtgttttgaaattgcttaaatcaatgaaatttcattttaagaaaacattaatcatttttttaatactttaaatcaaaggtaattaaatttggtttaatgctctttttcacaccacttttatcttaatggtatctcaagttgacaatcataaatcaaaatagctaactatagttgattagtagagacaaacagctcaaagataaagatctttaagccatcattttttttccttttcttttctatgaactgtcatttgttatctctacatggaatgtctagaagttgaaaattacttgagctttctttacctatactgctttccatttttgcgaactgcttttctttctcataatgaactttccacttacaatgatggttgaacattaataattcttcatctattttgtctaaaaatttccactcactttttgtgagtggtgtgaatgtcatgcagacaaatgatgtccaagctccactttttccattcattgcaagttgtaagcagaatgtagaatgtacgtataataaaataatgagaatggcaactgctagtactacttaattagaactaaagtatgaaaattaaaacgaaaataactttgatgctgttaatatatgagtttaattttgatagatagtgtaaaaatttaaattgttaattaattagaaatcactaaatgatttgtaaaacaattagtaaaaaagttataggaaatatatataattaattaattgcaaatgaaagtgtatttaaattaaattcttaactaacatatccttattgtgatattttgtatattttttatttaattgagacagtggaatgagatcgcactataattttcatcacgggtgtggttgtctaatataatagggatggttggtgaggaattttggaatgttagttggttttagactatatatcctcttgttcagttttcacattctcattagagttaagttgattttggggaagaactaatgtcttgaaattccctcttcaccagaagcagttttattgtgtctttatcgaagtcatcttctccagagacttgcctttaactttgaagataggaaatagatcagtcaaagacttcttacaactcacaacctttggaatttctctatgcctggttaacccacaatttcggcgcctgttgcggttaggaacataggctagcaaaaacactaatcgtttcaagagaaatgttaacacacttttctaatatattattttttattttaaaatttattaaaataaaaaaattcagctgatctcatattttatttagcaaatttttctcatatattaagtcttaggtttttaaaattataaagctaaaactaaaatgttttactaaatgtattttaaagtaaattttatacacaaaaatattttgattttataaaaattgtttggtcaagggagacatattgagccttcctaactataagctaccctgagggtttctatcttttttttttcccacttaattttttactttggcagcaagggttaaacctaccacatctacatgactatgtcttactttcaataagttacacctaaatagctaacatattcctcttgctcacgcacactatctttcgtaaacttttcacgatcatctttatattatcaaattcatttaattaaatatacaattatcttaatattataagcaagtctctgtataatcatgtagtgtttctaaattgaatgagcctaaatcacacactcctgaaaaaaggataaaaacatatttaatttcatttagtgtttaatagtgttttggtcttttttgtttttgtttttttatagttatttcttttcaaatttgatgacaacattgtcattgggtccttctacccttcacatcagcaaattggacactaaagagactcggtcagaaacaaataactactaggggtacaataacatgagaggatttaacacttttggagtaggaaaatgtactttaagaaaagaaaattatatgtttatccatgaacactaagctctagacaaaaaaaaaaaaaaaaccacgagaaatagtatataactctttagtggacaattggtgttgtacaaaattgaaatgatccagactaagtcaacaaactggtcttcttcattgaactcacagtgaaaccacagaatttattttcatctaccagtttccttcccaattcccatgttttctaaaacataacacactacagaaccttctaataaattaaaacaaaaaaaccaatattttacatgtagcaccacaacctaacaatttctacctacaactttttctatagactataatataatctatctccactcattcattcatcaagattgagaaatggattcaaatgcttgtctaccacacttgctagtgttagcaataacattggtattggttagtcatgcaatgggagattcagctaaagacaaacagaaatgtgcagaatccctgacaggtgttgcaacgtgtctgccatatttgggtgctgacgcgaaagcacccacagcagattgttgcagttgtctcacacaagccatgaagaccaacaagaagtgtgtctgccttattctcaaagacagggatgatcctgaccttggcttaaagattaacatgacaattgctgttggtctcccttctctttgcaaaacacctgataatctctcacagtgttctggtacgttcaatttctaattaagccttcctttttcttaaagaacactacactacagtgttatgtttccatttcctatgcaataaatgatctatcagtcttgttagttgtcatataacaactaatgtttttacattcagttgaaggaagttcctagaagggacagatgaatcttatatcgggaagagattgttagaaagtttggttgcagttgcagggcttctaatttggctttcatgagcttaactcaaatactacctatatattaccattttcatatcatgttgaaatgtaaaccattgattagttgatagtgtaaaaaatatttacactcttgagtgtactaaatctctgacagactcacaatagatattattgcaaaaccttttggagatttattttttgtttttaatactaacctagagtctacagatcaaagttaattaattgctgaaaattatgttcattctcattcttggcgctgttagtccagtgtgaaaacggacaaattcagtttcatgttatatatggctctgtatatgaaaaggaaattaaagaaaaagtagaatttgattatggctaatttcacccattatatttattacaagaaaacctttagataaaaattattttttggtacttttagcttggtcgtaaacattaacattacatcacgcacacaaacataaaaggcaaaccaaattattttacatccctaaattttatgaggaaggatgctataaatattaacaatacatctcacacatacaaagacaactaaaattatatcactaaattgaggtggggatagttttgaaaaaaaaaatagtaggtgtggttgtgtaggtgtgtttttatgtttttcaattcaggatattaaatttacaaataattttatgcttttcaattatattttaacaataattaagaaataaatctaaatcattctacatttgtttataggtacttggcaaaattggagatgctatatgggaatctaaattttgcttaacacaaatgtggtatatgcaaggaaaaatcaaattgaaaattttttaaccaccacttcaaattttaaaagattcgtttcaatataaggatatgaagaacaaattgtttttacagaacattccctccatgatgttttcctttcctttaggtgaaaaaaatagacatttccaaaaataatggaagtgaaccttatataatgctgtttatatagagaagtctttcaaaatacaatttaaagtactattactacaaactaatcaagtctctcaaattttgcgtcgtcttgtggcagaacacattgtctctcaaatttgaacaactgatcaagtcctacttttgaagcctccatacctggccatacatagttggagtccacacaccataaatttcaacaataatttggcaacttggcatttaagaggagggtaattctgcaaatggtctttcatattcaggatacaatagattgtagttttcaatgattcacgtgaaatgttcacaatgtaatgttttcaatgttttataggtcttaaataccaatagcagacaagatcatgcttatgcttttttgctatcgtgctcctgttccttgccactggccttgatgaagccaagcattgtctctttgccttttaagttgtacatagttgcaaaacaggtacatgtgaaagaataatgcttattaaaggtaaggttgattttaaagtgggcatgcaagaatgcattcattatctcaagtaaataaattcaagcgaatatgtgatttggattagagaatagtattatccagtgcacactaaattggagagattcccaacatgtggtttcaaaactaaaagaacttaccaactatttgaattttaatctacgtgatctagctaatgttttctatcagagaattacaactagttgatcttaagtacaaaactatactaaatatgcaaatctttacatctaaaaacagaatttaaataaggctctcaaatttgaagaaaaaaaagaagatagcaatgactacaaattgatcaacctgccaatacaatgataaaacatcggtgtattctaagcaacactaaacagtgatactacctgagcgaaaagattgaagtttgaaccacacattatcaaggaaatgaaaataggcataccgccatgatctacaaatcagcaaaggagcaatcactatccagaatcccacaataaatccaattgtcatactgacaaaaaaccaattcactccatgcccatcacttccttcataactatgggtgttcccattggagctgcagtttatgggcagtggtggaccacatagattgttgccgatgaagctggaggcatcaaaggtttgcaattgagttcctgttggaatatttcccttcaaatgattgtaagacaagtctagcatgctcaaaaagctcaaatttgcaatgcttggagggatttcaccaaaaagttgattcctcgaaaaatcaatggactgtaatgatctcatattacctataccttgtggaatatgaccaatcaattggttgtgggacatgtttaaaaaattcaatccatttagatatgtgatttctcttggtatttcccctaataacttgttacttgacagatcaatgcttgttaccaaacccagaaagtttctgtactcatctcctcttcctttcagccatagtagcacactaactatacctgataccgaagagaattgtttattatctggtgccgtagaatagatacggggatctgtactccggttcactagtgtcatggcactcaagttacggaaacagctgggtatattgccagacaaattattttttgcaaggtctaaaacctgaagaagactcatctgacatatttcatttggaatgtgaccggaaaaactgtttgatcgaaggcggaggattttcatatttgagagcttttctccaacccacggtggaatagttcctgaaagattattttctccaagatccaaggatatcaattggctagtcttcttcaaactggtaggaaatattcctgagagtgtgttgttacgaatttgtaaagactgcaagtctgccaaggaacccatggattggggtaagttcccaacaaaatggttgctttgtaatttcacatccacaagaaatgtccaattcatccagcaatcaggtatttctcctgacaaattatttgatgcaagattcataaattctaatttcattggcttgtcctgatcgttacataaaaaatcattcatggattcagagaatgaattgcttgaaagatctaaccgaagcatataacttgaaagatagggtaatttaccacataagtgatttgtgcttagatcaacagtttgcatagatattggattttttaatgtagtcacaagctcaccatggatatgattatgagagaggtttaaatagataacctgagaaagtgcttcccacatctgtgttggaatagaatctaaaatccccgtgttagacagtccaacatattgaagtttgttttgtgacagaatccacgatggaaagttgggacctatctgccatgatgtcacatccaaatagataagttgaaaattaggaatccaattaggacccacttttaaagtgaaattgttccctgatgcatcaaactccttcaaacttgtaagatttgcaagatcatcttcgttgacaactccttgaaaattattgccatcaataagaagcgttgacaatttagagagtgatccaagactttcaaatggatttccgctgaatttattaatagagagatagagatattttaaatctatctcccttaagttgcggagattacccaaaaaagtcggaattgttccttcaagttgattacgtgataaatcaagttcaacaagagaagtcaaatttcccaaagaagttggaatggttccttcaagttgattagatgacaaatgaagttcgacaagagaagtcaaatttcccagggcatcagaaatagtcccatgcaagttgttgagccttaggtccaggaacttgagtcgatgaagaccgtataagcaattaggtatagaagatgaaaatgaattttcagacaagtcaagattttgaagaagtgagaggtttcgaataccaccaggaatcggaccttggatttcattaccctgtaattgaagagaaacaagtttcttcaatttgaatatccacttggggacaaaagaaatggcaggggaataactggtattgtaaagatggagagtttgcagagatgagaagttgagcaaggatggttcattatagtgagggagtgtgcattctgaaaaatataggtgggtcaaagaaggaagagattggagagtgtgtagccaatgaaatgctttggataggtttgcataactcaaatgaagatattcaagcttccacatacttgatacccattctacattttcaacaaacagaggttcaagactagaatgacctccaaggccgagatagagcaaattggagagattcccaatctgagatggaatcttccccatgaatccagtataagagaggtcgagctgagtcaaggagctcattgtcccaaggaaagaaggaattgccataccttctccaaggaaataattgtcgctcaagtcaagatatcgaagcttagagagattcccgatctgagagggtactcttccgttggcaacttctctcaggtcaagatacaccaaatttgagagattcccaatctgaggaggaatcttcccatagaatccactatcagagaggtcgaggtgagtcaaggaagtcattgtcccaaggaaagaaggaattgccgtaccaaggaattcattggcgctcaagtccaagtaattcagatgctttaaatcagccaaacaaggacttatctctccaccaatctgggatctctcgtaagcattcacatcgaatccataggaatgatcgaaagcagaatcataagtgtggaggtgaagctgaagaacatgggaagtaaggttgtggcagaggactccataccagtggcaacagttggtattattatgattccaagaccaaagcttatttgaaggatctatgagattattcttaaacttcaaaagtgtctcacgctcacttgggatgcacacactctctctgcatggtaagctgaacaaccaaagctggacaaagacaagaatataaatggaggaattcatgatcacacaaggatatatgaaacagcttaattgtataagtgcttcttgctcctgcatattaaacttacttctttctattatttatactgctgccctgcctgtttaaaaaaaaaaattcaagtcttctatttcatgatatcccaacccataattaatattaaattattaaaattttaatattcaaactaaaaataatgtaaaagaaaattgtcttctaattaccatagcccacaccatcaggtccatctcaaggttttctatattttcatcttgaacctttgaacactccacaaagtccagccatgttatggtctgacttcttcaacttgaaccataggtcacagcattaccttcatatcaagttccctgtcagacaacaaatgttgccagttaagttaagcaaggaaaaaaaaatataattgatgaatgcatcaattataggaaaagggtgtactttaaagactatttctattaaaaaatctataaaaaaaattatttcgttccattctaattatttaattttaatcaatttttcagttcacaaaataatattctcttatataggaagaaaagactagatttaattatcatcaattggaaaagttattgtgtcatgtatttctaattgtatttgaacttgaatattattttatttatcatataaaaattaattagttatataaaaagaagtaaaaagaatattaactttttttctaaaaataaaattagtatcatattttatattttttacaagttatcaacttaaataagaggagaaacataattttcattttcatttaactttttaaattgccaaatttaagcgatcatgagaatactcacgttcaatataatattctcaaaaaaaaaatccataggataacttaaacaatctacaaagaaatataatttattcttgtgtcaaatactaaaacaagaaacattttttattttagtttatcgtatagaattacttaaatcaatgaaatttttattttaagaaaatattaatgattttttttttaaactttaagtagtttacatcaaaggtaattaaatttggcttaattagtcttcaaattttaactattattcaaatcaatccttttgttaaaccttgtatgtgttaactaaacaacaaaaagtcttgccttataaaattcaagtattctattacatgcggtttgaacccataattaattttaaactatcaaattttaattattcaaaataaaaaaaatgaaaacaaaattgtctcccaggcaaaccgctggccactccaccaaatccatatcatggtccccactttttcaacttgaaccatagactactccatcaagtcatgtgaaggtcctccattttttcatcttgaaccttaagacactccacaaagtccacccatattaaggtctctgacttcttcaacttctgcaacgcatatatggaaaacaacttaattgtataagtgcttcttgcttctgcatataaatcataaaacttctattatttatactgctgcaagtgtctttctttttttttttttatgacgtttcctttttttaattattgactttattatccaattctcccgagctaattcttagaataggaaataattttgaatttactttatctatctccctttttaaaattcctatatacacaaaattttgtattgaatttaactattatttaatcaatcctttcgttaaacttttgttaattaaacaataaaagtccaacattttattaaaaaacattcaagtcttctctttcatggactccatcaagtcttttattaaaagtccaacttttgttaattcaagtcttttacaaaattttgttaattcaacttttgttaattattacaaaatttggtattgaatttaactattacttaattcaagccttttattaaaagttcaacttttgttaatttaaatattattttgttaattaaaccatagccgattccatcaagtccatctcaaggtcctgtattttttcatcttgaacatttggacactccacaaagtccagccatgttatggtctctggcttcaacttgaaccatagcccatagggcacaaacaatatattaatgataaatacatcaaatataggaaaagggtctaatttaaagactatttcagttaaaaaaatctatatgaaaaaagattatttcattcatatcttgctatttaattttgatcaattttttaattcacaaaataatattcttatatatgaaaaaagactagatttaatcgtcattaattggaatggttgttgtgtgatctatttctaattgtattcaaacatgaatattatttttttaacatataaaaattaattggtgatataaaaagaagtgtgaaaaagaatattaatttttttctaaaaaaaattagtagcatattttgtatttttttacatgtcatcaacttaaataataggagaaacataattttaatttccattttaatttttaaataattttaattgccaaatttatgcaatcataaaatttctcatgttcaatataatattcttaaaaaaaaaatattcatatgataacttaaataatctactaagaaatatgatttattcttatgcagatcgaatactaaaataagaaaaaaaatatattttagatcacaatataaaattgcttaaatcaatgaaatttcattttaagaaaatattaatcatttttttaatactttaaatcaaaggtaattaaatttggtttaattagtcttcaaattttaactattatttaaatcaatcctttcgttacacctttgttaagtaaatgatagcttagcaagcaagcaggtgcaagcagtaacactctcacaaagataaagatctttaagccatagttttttttcccttttcttttctatgaactgtcatttcttatctctacatggaatgtctagaagttgaaaacttgagctttctttaactatactgttttccatttttggcgaactgcttttctttctcataaagaactttccacttcgaatgatggttcaacattaataattctttatctattttgtctaaaaatttccaatcactttttgtgagtggtgtgaatgtcatgcagacaaatgatgtccaagctccactttttccattcattgcaagttgtaagcagaatgtagaatgtacgtataataaaataatgagaatgccaactactagtacgtagtacttaattaaaacaaaagtatcaaaattagaacgaaaataactttgatgctgttaatacatgagtttaattttgatacacagtgtaaaaatttaaattgttaattaattagaaatcacctaatgatttgtaaaacaattactaaaaaaagtttcatttgaaacttagtcttccacccgtctcaagctctccacatgaaaactaagctctagacaaaaataaataaataaataaataaccacgagaaataatatataactcttaagtggacaattggtgttcttttgtgcattcagttgaaggaagttcccagaatggtagaaagcaagggacagatgaaacggccacagctaagaatagtgcatcttatatcgggaagagattgttagaaagtttggttgcagttgcagggcttctaattcggctttcatgagcttaactcaaatattacctatatatatatatatatattaccaatttggcttaactctaatttggctttcacaaaataatattctcttatatatgaaaaaaaagactaaatttaatagtcatcaattgaaaaggttgtttgtgtcatctatttctaattgtattcaaacctaaatatgatttcctttatcatataaaaattaattattgataaaaaaagaagtggtgaaaaagaatttaacttttttctataaaaaatagtatcatattttgtattttttataagttatcaacttaaataatagaagaaacataatttttattttcattttactttttaaataattgtaagtgccaaatttaaacaatcataaaaatactcacgttcaatataatattctaaaaaatatatttatacgataacgtaaataatcttctacaaagaaatatattttattcttgtctcaaatactaaaataagaaacattttattttaatttacagtataggatttcttaaatcaatgaaatttttattttaagaaaatattaataatttttttaaaactttgagtagtttacaacaaaggtaattaaattcggcttaattagtcttaaaattttaactattatttaaatcaattaatcctttcgttaaacctgtacgtgttaagtaaataacaaaatgtcttgccttataaaattcaaatattctattacttgcagtttgaacccataattaatttttaaatatcaattttttattattccaaataaaagaaatgaaaacaaaattgtatagtctcctagacaaaccacttcccactccaccaaattcatatcaaggaccccactttccccacttaaaccatagactactccatcaagtccaagtcaatgtccttcattttttcatcttgaaccttaggacactccacaaagtccagccaaccatatttaggtctctatcttcttcaacatgaaccataggtcactacattaccttcatatcaagttccttatcattgacaacaaatgtttagaattaagtaagcaaggaaaaaaattataaatgatgaatacatcaattataggaaaatgatctaatttaaagactatttcagttaaaaaatctatataaaaaaagactctttcgtttcaatctaactatttaattttgatctattttttaatttacaaaataatattcttcttatatgtgaaaaaaactaattttcattgtcattaatcaaaaagattgttgtgtcgtctatttctaattgtattttagcctgaatattatattctttttcattaaaaattaattagtaagatgcaaagaagtgtaaaatgcttgtttaacttggtctaccataattattgagatcataacttttttcttttataagtcttggtccaaatttttccatatattgtagatcatatttagcttaaaaagtaaattagaggatatgatataccaagaagtgtggcatgtttttttaaattatttatctatggccttagctattttattgttagaccacaagtcttcatatattaaagtctttgtctgaatttcatttacttgtgtggtgatattttaagaatagtgatagaagagaaaaataaatatatagtttattgaaatatctaacttatgaagatttgcattcttaatgcataagcttttcagtttatatattatcactatttggaaatatttgttgtgttaattgtctatttctaattaatttgaaaatgaatcttaattttttatcataaaaattagtatcatattttttattttctttacaagttatcaacttaaatactaataggagcaacataattttaatttccattttactttttaaataattttaaatgccaaatttaagcaatcataaaaatactcacgttcaatataatattttaaaaaaataattcatgagatcacttaaacaatctacaaagaaatataatttattcttgtgccaaataaacaacaaaaaaagtcttgcattattaaattcaagtcttctattacatgcaatttgaacctataactaattttaaatgatcaaatttttattattgaaaataaaagaaaagaaaaaaaaattgtcttctagacaaaccacagacaactccaccaaatccatatcaaggtccccactttttcaacttgaaccgtaggccactccatcaaatctatgccaaagtttcttatcattgacaacaaatgttgagagttaagtcaagcatgaaaaaaatagggtaaaatatatcatttctatccctataaaattttaatgtgctactttttttttttatcctgagttaagtttggatgatagataattatcatgtattcttagattttggtgtcattttaggatatttatgtgatatatgtcttttatgttttttttattgtcatgaactaatcttctcttttgttggagttgaatataattggttcattttttatgtaatgactattttttaattgaataaagcattctaattgtttctcttctatgtttaatatgtgtttttggcttaatcacctgtttgtatgattttttttattcaattgtaattaaaaaaattctttgacctacgaattgcaaaaaacacctaataatttttatgtctaggaataagataaaaagaattgagcatcaataaacactttatcttaatgaaaatcatttagttatgttaatttaagggattgatagtgtaatcaagggatttaggtctattcactaggaattaaagtgaagataatatgatgggtttatgataatataacctttattaaatatgaatgtgtagttattaggtgatagaaacttcaatgaaattaaaccccaacaattttttcattgatttaaccccaacaattacatgaggtgtttgttaaaattcccaaacaatttttttccttaattttttcttttattttcttctttagttttcttatttttatttcttcctttaatttctttatcgttatgcatattgttatttaaatcaaattagctaatgttaattaatttcaaatattcatagtatagaaattatactttttattacccaattattgcctaagtcctgttaatgagtattatagaaaaaatgcatgaatagcaagagaaggaagatgtggaagggtttagaaactgcagaatcctatgcaagctccaacattctacactaattaaattcattcaggcaaattctaagttacatgtgtaaaacaatcttcttaaatccaatcatcgagtgtgtcatttcaggtattttaatgctaatcattgttagtgcacagatagtagatgacaataatgcgtcataaatacaaaacagaatttgatgctcaagtctgaagctcgtctagttctcttaacattaagaacatttattaccaatgaaagcaaaacaaacagacaccccatatgaacatgtacatagtatggtaaaccttttcacatttttaatgtctagaataacacgttgtaatgtctctcactcctaacagttaacatgtaaactcacaatttcccatgtaaccttcttaccttcaaaactattatcacataaatcagatctctcaagtggtcaagataatgaaaataagcacgcctccaagttctgttgaagaaaacaacactgcaaaaaccccaaaatcctgctgcaaatccaactcccataccgatataaaactctgatgttccaaagaaattaccatcaccgtgtccaacagaagcactctctgtcaactcttccttgtctgtgcaattttttgttacaggaggaccacaaagctcaggatttccagtgtagctaagttcttcaaagctctgaagttgggtgctcgtgggaattctgcctgataagttgttgtatgatagattcaggacactgaggaaggacaaatcagataagctttgagggatttgacctgaaatgttgtttagtgagagatcaagggattctaacaatttcatttttcccatgtcatttggtatccctccagacagatgatttctagacaagttcaaaaaccgcaaagcagatagcttggaaatttcagatggaattgctccagacagcttattacttgaaagatcaatcattctcaccaatatcagattgtctctgtactctaactcatctcctttgggaactaagacaagagtttccttgtagtggttataactgaagtcagagccatatgaataacttaaagggttggcaaagaagtcatcttcaccagccattgtcttcatgtctttcaaacaatttggaatggatcctgacaggctgttattgccaagatccagcactataagggaagaaagttgacaaatcttttgagtaatgctgccattgaaattgttggatcttagacgaagaaccattagatattgcatttcccacatccaatctggtattgcgtcagaaagttggttattgcccatgtcaatgaatttcattatagagcaattttgcagtgttgaaggaatatatccagagaagcggttgtcgtctaacaacaaagactcaagttgagatagataccccatggagtttggaataacaccagacaaattgttactacccaagttcaaatgcaccaatgcttgccaatgcacccaacagtgaccaagatcaccatataagacattatttgaaaaatcaagcacacttaacttattagtggcattttcctttccacataaaaagggagaaattgttccggaaattgagttattggcaacattcagaacttcaacatttgcagacacacttggcaatgtacccttgaacaaattagaactcaaatttatgacgctggaattgagaaagatgttagataggtctccacttaacagattgtttgacagatccaggaattcaatttgcaaagtccaattccaaaaccaacttggaaccaagtctgccatacctgccttagacattgtcaaaaccttcacagaactttgcctttttagccattctggaaacttaggacctattccaaaggagctcagtaaaacatattcaagctgaaaaggaggaacccatccagagttgacactgaggaacaagtttgtccaagacaaacgtagttcctttaatttcaaaagttttacaaaatttgactcttttatagatccttctaacaaattagatgaaaggtctaacatcactaaatttgagagagttccaagagttacaggcatatcaccagtcaaagaattagttccaagattcaatacctgcaggtttctgaggaactcaaaactcttaggaatggttccattcagtcggttgtgagccaggtttaaagttctcaaggatgacaagtttgcaaatggtgagggacttggacaagtaaaggtattattactgagatttagaacttcaagatgcttaagctggcctaatgaatctggaagtggcccactgagctggttgttctgcaggtctagattttttatgttctgaaggcttgatattatttgtggaatttgtctgatagaatagcaaatgcagaggaagaaatgaacgaagccacagaggacccgagcacacaagccaacacagaggagtcaaacatacaagtagatacaggggagcctaattcaaaggtgcgaatagcaagtaaatccaagaggaaggttgtcaggcccgcttacctcaaggattttgtgtaaaatccttcatcaccgtatgggaatatagctgttgctcttagtgctgccacgtaggatgatcagaataacaataaaggatattgctgatattctgtaaatgcaaaatgacaaaatctgttatacagaattcagtataaatcatcatgtaatcatagcacaattcaatgaatgaaaagctaaattcccttccttatcttgatctctggaggtgctggaaccctcgaaaccagtcttctagttcttcccctatcatcttggtgctctcgttgatccctcctccatggctgactctccccttacccttgaagaagccatccgcaaactcacgacccatcaaatttcccttgctgaaacccttcagaccatggctctgaaacttgacgagcttctccaccgtcttccccctgtgctccctgaccccatcgcttcgtcttccccaccccctgttgcttctcctgccatcacccacaaaatcaaaatcgatgttccccgtttcgatggtaatgaccccatgggttggatctttaagatcacccagtttttttaatatcatcagaccccagaaaatgagagacttaccgttgcttccttttacatggatggtcgcgccttgtcttggttccaatggatgaacggtaaccgccagtttacttcatggcaaggcttcctacaggcgcttcaaactcgttttgctccgtcgcagtacgaggatcccacggggacccttttcaaattaacacagcgaggcacggtggctgaatacctcgccgccttcgaggaacttgcaaaccgtacgattggccttcctcctccctttttacttagctgctttgtttcgggactcacccccgaaatccgccgtgaggtccaggcccaccagcctcttacccttgttcaggcggcgggcctggctcgtctgcaggaggaaaaaattatggacgcgcggccccagcaacgccccaaaccacctccaccttttccctctccctccttaacacagccccttcctctcagaaccattaaccctagccccacccctcttttacctagccctccccatcccacaccacccgccgtcaagcgtttgaccccggaagagattgcaacccgcagggagcgcgggttgtgtttcaattgcgatgagcgctaccacagggggcaccgctgctcttctcgtgtttttctcctcatctctgaggatgaagaccctccaccacttcaaatacctcagcccaacccgcaacccgaacccgaaacacccatacccgacccgatagacccgtacccggcccaaatcagctttaactctttagccggaaatgtcgcgcctgaaacgttgcgtttcatggggaccatcggaaaccgccatgtggtactgctggttgacggcggcagtactcacaatttcattcaacatcaacttgtttctcaattaagcttgatccctcgcaccaccacccctttgcgagttatggtggggaacggacaacaattagagtgcaccagcatctgtgaatccgttccggtcaccattcaagccactgaattcatcgttgacctccatgttcttccaattgcaggagctaatgtggttttgggcatccaatggttgaaatcattgggccctgtgctcacggattacaactcactgcgcatgaaatttttccatgcaggcactttcgttgagcttcagggggacacagagaccactttgaactccttatcatcctcccagttccatcgtcttcttcagcatcaacccgagagtttatacttccacattgctgtcctccatgacgacacttctacactcaattccgatattgaccccgtcattcaggacctcattaatcgctttcaacctctcttccaggtccctgagaagcttccgccggcgcgacccaccgatcatcgtattcatcttattcctaatgccaccccggtgaatgttagaccataccggtacccacattttcaaaagcaggagattgaaaatcaggttgaactcatgctccaaaagggcttaattcaacccagtaatagccctttttcctcaccggttttactcgtgaagaaacaagatggtacatggcgtttctgtgtggattatagggccttaaattctctcacagtgaaggatcgatttccgctacctactattgatgagctcctggatgagctcgagggtgcccgctgcttttctaaattggacctacttcaggggtaccaccaaattagaatgcattccggtgatatatctaaaatggcgttcagaactcatcatggtcattatgagttccgtgttatgccatttgggctctgcaatgccccttcttcattccaggcaaccatgaattccttattccggccgtatcttcgtcgattcattatagttttcttcgacgacattcttatatatagcgccacttttgcagagcatctcactcacctcgaagtcgcctttcaggtattgctaagccatcattttgttctgaagctttccaaatgttcatttgcacaggcccaggtcgagtacttgggacacatggtgtccttcgaaggagttcaacccgttccttccaaaatttcagcaatacagcaatggcccattcctcagacgactcgagctgttcgaagcttcttaggcctcgcaggcttttataggcgcttcatcaggggatatgcttctcttgccgcccccttagtagccctcaccacttcagacaagcttcactggtcagccgaggttcaggctgcttttgataaattgaaatgtgctttatcacaggcccctgttcttgcattgccggattttagcttaccctttcaggtggaaacggacgcttccggggttggaatgggggcagtgctttcccaacaaggccaccccattgctttttatagcaaaccattcactgctaagcttctaagggcatctacgtatgtgcgtgagctatttgccatcaaggcggctgtaaaacgatggcggcaatatctccttgggcatcgttttatcattgtcacagatcataagagccttaaggaattgcttactcaggctgttcaaaccccggaacaacatacttatctagctcgattaatggggtatgattaccaaattgtatatcgctccggcagtcataatcaggccgccgacgccttgtctcgtctcccggagcaaagatcttccttgatgatactctccgtgccctgtctcacgtttatctcagagcttcgtcaacaattggattccctgcctgagtatgtagcccagaggaacgcgattctgcaacaccccctgagtcatcctcatttctccattaccaataacttgatccttcataagaatcggatttgggtaccccgaggatttccgatgatacctactttaatcacggaatatcactgcactccgactggaggtcatatgggcattgccaagactcttgctcgtatcacagaaaacttctattggcagggccttcgggatgacgtaacccgatttgtttctcagtgtcttccctgtcaacagacaaagtatgaaacgaagagaagcgcgggtttattatgccctttgccggtaccccaccgtccttgggaagacctttctcttgatttcattgccggactccctccataccatggcaatactgtgattttggttgttgtcgatcgtttttctaaagggcttcatttgggcatgctcccgacatctcaaacagctcacgcggtggccactttattcatggaaatagtcggcaagattcatgggctcccccggagcttggtctccgacagggatcccctatttgtcagccaattctggcaggagttattccggtacagtgggacgcagctccgcatgagctccgcttatcatccacagagtgatggtcaaacggaggtcatgaacagggtaattgagcaatatttaagggctttcgtgcacagcagaccgaggacttggggaaagcttctcctatgggttgaatggtgtcacaacaccgcatggaatgccgccaccagttcgaccccgtatgagatcacattcggacgaaaaccattcaattttcctgattatctgatgggaacctctaagatagtcgcggtggaggacatgattaaggagagggaagaaacgttatgcatcattaggaagaaacttctaaaagctcagggagctatgaaaaagtccgctgacaacaagcgccgggaagtggtctaccagcagggagattgggtccttcttcgactccggccacgtcgccaagcttcagctaagggagtctttgaaacaaaagggaaactagcaaagcgtttctatgggcccttcgaggttattgaaaggattgggcctgtggcctatcgtctgaaattgccggaataagctcgtattcaccctgtttttcactgttccctcctgaagccatttcacggcgacccaacctctcccggaaccaatgaggtcactaaattgcctattcaattttaccagaatcaacccctcgcaattccgttagccattttggatcatagaaggcatcctcagacaggagaatgggaagtcctagtgcaatgggaaggactctcgccggacgagacttcgtgggaagattggaattctttacagcaagattatcaccttgaggacaaggtgactctgcaagggccaccgaatgatagaatagcaaatgcagaggaagaaatgaacgaagccacagaggacccgagcacacaagccaacacagaggagtcaaacatacaagtagatacaggggagcctaattcaaaggtgcgaatagcaagtaaatccaagaggaaggttgtcaggcccgcttacctcaaggattttgtgtaaaattcttcatcaccgtacgggaatatagctgttgctcttagtgctgccacgtaggatgatcagaataacaataaaggatattgctgatattctgtaaatgcaaaatgacaaaatctgttatacagaattcagtataaatcatcatgtaatcatagcacaattcaatgaatgaaaagctaaattcccttccttatcttgatttctggaggtgctggaaccctcaaaatcagtcttctagttcttcccctatcattgtccctgtaaaaggttactgtgtaaatcaagttggacaagagttgtgctgagattaaatagccatgaagggatttggtgattgagattgttaattgaaagatcaaggacttggagatgtgtgaagttggcttttccttttggtggtcctaagttatcaatttgacagctctccaagtgtagttctgaaagagatggaagtgcactcagtacttgaagccagttaccttgtttatgaaggtctgaaccactcaaatcaaggtactctaaggaagatagccttgatatccaattaaggttatctatctgaagagcataattgtatccaagattaaggtgctgcaggtttgagaggtttcctagttgatgaggaattaatcccatgaacccacttaagctaaggtccaagtatctcagactctccaatgagcctaggaagcttggtattggagtaagaacaaaataatttgaactcaagtccaaacgattcaaatattttagttcaagcaaagaaggactaatctctccactcaactccctatagggagagcccgcaggtgcgtcaagattgatttccatgactttacctgtgttgttgcagtgaacccctggccatgtacagcaatccgatttgtcagaccacgatgaaagcctgtttgaagggtctgctagtccatgcttgaagctgaggagtgcattcctttccttctcactgcaagtcatattgagccttgctgccttgcttgcactgaagtggagagttgttgcagtggacaatatcaagagaagaacatgagttgcatatagcactgccatgaagaagaaggaagacgaaaaaggttgaatccacaattttctggttcacggttggtatttactactaacaatgcctatataggatatataccatagaagggtttgcatttaaaattttattccactaatggtggtggttgcgaaatgcacacatatgtagaggtatatatgtctacaaggagacatttaggattaaaagtgtctaaccacaccaccattattttgctctagtttattttattttgatttaattacccttttaatccttatagttgtgataattttttttagtccctataatttaagactttcattttggttcttatatttacaattttttttatcttttgaccctcgcggggaagattcaactcacacataaacatgaacaaaattaataaaaatagggaagcaagctcaggtacaaatgaagtgtaatggaggtatgagacaaagccactacacattccattattcttgagtctgccaccgacctctgcaagcttagcatttgccaattgccatgatgtaatctccttcttgacagtctctcatcaagttggagtggtatcacagcattgaactaagttgatcgttccaatgggatgatggttttgattgctgcagataaagtgtgtcattgtgagtttctggtcgcatgagttaaactataagaactaaaaaaaatattgtcgtaactttaaggtccaaaaggataattaaacctttttttttttttaacaacgggttatatatatgtagcagtttattctaaacaatggactacgtgtgaaatctttgaattctatgtaagaaatgttatttcaaacttctcatcagtcttcatgtcaatgatgacatgctccatttgaattctaatttttttgatgatattgtcgtcttgtatgttttctaattcttttgatgagttagaaaattaagcacacaaacacatcaagataaaacgattacataaactttgaaattgttagtctttgtagaaattttacatcaagacaaattaagtttgcattttctgtgctttagcaaaatgacccatgatatttattggtcttaattctaggtagacttttcttagtatgttttctaattcttttgatgggttagaaaattaagcacacaaacacatcaagataaaacgattacataaactttgaaattgttagtctttgtagaaattttacatcaagacaaattaagtttacattttgtgtgctttagcaaaatgacacatgatatttattggtcttaattctaggtagacttttcttagtatgatatcaatcttagaaagttttagaaatattctaatgtgcaacttacgaatgttttggaagagaggaaagaaaatgaaaaagggtaaaaaagatttaaaatttgaatttaaaaaattagaagaaaagaaattttaattggccaaaagtaacacacatttccatcactctccttttttatttttcttcttttatacaccttacacctattttatctttgaggaagactaacaatactcttttctgttatttattaaaatttataaaaaatcacaaattttaattaatgttttcacatcaaaattaagaaatatatataatcattaaataaaaaatagaactcaccaatttaaatttataatttttagtcaataatatacaacattaaaaaaaagatttttttttctttataaccaacaaaagagtactagacagtgtcactaacgatatttctcttttatattcccacctgcgcaatcactttaccactgaaaccacaacaaccatcacgctgtcccacaattttctcttattacattggctaagtgcattttttttatttttccttcatataacctttaatttggttcacaatttaaagaatatgtcttctaggcttgaagagagcatactaaatacttaggaatttttgtcatttcatttgttctcttgaattagaaaatatattaggaccttattttactttagagcatgctagtaattttaaacattaagatttctctaatttttctaaaatactttttttatcaatttttttatttaaatatatttttaggtcctttaaatttggattatctttgtttttttcctccaaatttaatttttcattgtttagttcctcaattttgaaaaatgttttctaaaccctcttgactgatttttgacgatttaaatgcataacttgtggcatttttttgtaggaggaggactaaaaaaatattttttaaaattaagggaataaaaataaatttaaatttggggatcaactacaaaagtaatctaaatttgatggtccaaaagcatatttaaacaattatttcaagagactatgaaatttgattgaattaagacctaatctttgtaagttcttgaagtagcctaataggtagattctgattataaaataaggattactttgaggaatttattattaacataaatctccttatcttattttccatgatcaatgttctaattgtgagattttgattagggatgataaaataagttcaatccattggattgacccatttaatatgctaaacaaagcaatataagtttaaatttccaacctattgttaaaataggttcaacctatatatttggtaggtaaaggggcagttatgttggatcaacgtgtcgggaaaactttcctttttatttatttttcttttatttgttgtaactcatccaaacttacttgttgaggaggatggttgttttgttctttttggtttttcttcacattgtgtggttgctttgtttcctttcatttctctttcatgagttttaagagggtgatctgaatggggggaaagatagattaaggtgtgattttgatgtggatgtgggttgattattgtggaagaaaaattaatgacagaaagagtgataattttacattggttgtttcataattgatgtagaaagatactttttatgttggttacaaaacaattgatgtaaaaaaggaaatacattttacatagacaagatttacatattggttctagaattgatgtaaaaagctcattttacctgatgcaaaatatctccccaccattggtgaatttaaaaacatgtgcaaagacttttttatttcttggggaccggtgcaaagacttgaaattgctagtctatgcaaaacattcatgtgaagacaaattagtcatgcattttttgtactttgacaaaataacacatcatatttcttggtggacttaaatattttttttttatattttagtccttgtaattttaatacttggttttagtccttactatcaactatcaacatttacggataatgttgttggttgtccattgactcgtcatgttactaatgagttaatttgatagactgtcatatgtaaattttgtagtaatttggatcttcaaattctcatgtgttaaaaataattgatagtgctagattacttgatgagaaattttaaaaaaattacacattatttattgttaagatctttgatagcatgagaagtcaatgaatggttaatgtaactacatgttatgtagtcaattaatgttcttactttgataatatggactgatttatttttttaatttttactgggactaaacattattgaaaggctaaaacaaaaacactctaataatttataggagccaaaatgttgtttaagccttgtttgttttaattttacatagacttttctcagcatcgtgtgctcgttaaagtgacaaactcaaatactttaatgtgcagctcacgtagtgtaatttcatgacattacaaaaattcccttgataatctaaaaataaaatctgttatattttttatttattaaaatttgtaacatcagttttttgtcgaattatctgatgaaattttagttgttacaacttgctggtacaatatgaagtagagtttgatgaacctgtagttaatatatgagataattttattacacaattatataattattgaattttttattataaattgcttatcacctgagtgtaataaaggaatttaaaatatataagcctcgtatatggagtcttcgtattttaatttttaaaataaagttttttttaagagaaaacttccttattttgctgtcttcgataagtgaacgagaattaacaagtcagtcatttagccatactatgtttttcgtcgtcatattttttctttattctaaaaatttacatttgaaaaacttattttgttttcttgtctttgaacaagaattaacaacttattcgtatggttgtactatcatcactgttccagatttttttatttcttgggacaagtgcaaagacttaaaattgttagtctacacaaaacattcatgtaaacacaaattaatcttgtatttcttgtacttgggcaaaataacacatcatattttttggtgtgcttaaataatttgattacacaattatataattattgatttttttattataaattctatattttttccatgaagaatggtaagtttaaattgcttatcacctgagtgtaataaaggaatttaaaatatataagcctcgtatacggagtcttcgtattttaatttttaaaataaagttttttttaagagaaaatatccttattttgttgtcttcgataagtgaacgagaattaacacaactctgtcatttagccatactatcagctatataaatcctgccgcaggctccatctttcatacttgacaatttaagagaaagtgatcacagtaaccgatctttgttttactcttagtcatttcataatgagttgttattctctgaaactattttatgcacttttgctgcttttattgcatgctgctggatccattcttggattcaacagccttcccaatagcacagaaattaagtgcattcagactgagagacaagcactcctcaacttcacacatggcctcaaagatgactctggcatgctgtctacatggagggacgatggcaataacagagactgttgcaaatggaaaggcatccaatgcaacaatcaaactggtcatgttgagatgcttcatctccgtggtcaggatacacaatatttgataggtgcaatcaatatctcttcattgattgcccttgaaaatattgaacacttggatctcagctataatgattttcaaaggagtcatatcccagaactcatgggctcgttcaccaacttaagatatctcaatctctctgcttcttcatttcgtgggactattccttctgatattggaaagcttacacatttactgtctcttgatctaggtggcaatagctatctccatggacaaatcccttatcaacttggaaaccttacacatttacaatatcttgatctaagttataattatctggatggggaactcccttatcaacttggaaatctctcacagttgaggtatcttgatcttggtggaaattcattctcgggagcagtccctttccaagctgggaatcttcctttgttgcacactcttggacttggtggcaattttgatgtgaaatctaaggatgcagagtggttgactaatctttcttccttgacaaaacttgagctaagttcactacacaacctttcctcttctcatcactggctacaaatgatcagcaagcttattccaaacttaagagagttgagactatttgattgttctctttcagatacaaatattcaatctctgttttattcaccttccaacttttccactgctcttaccatccttgatctttcttcaaataagctcacatcctcaacatttcaactgttgtcaaactttagccttaatcttcaggagctttatcttggtgataataacattgttttgtcatctcctctctgcccaaactttccggctcttgttatccttgacctttcctataataatatgtcatcatcagtctttcaaggtggtttcaacttcagctcaaaacttcaaaatcttgatttgcataattgtagtcttacggatgaaagttttcttatgtcatcttctttcattatgagttcttcatcttctcttgtttcccttgatctctcctcaaatctgttgaaatcatcaactatattttactggctctttaactccaccaccaatcttcataagctttccctttatcataacatgttggaaggtcccattccagatggatttgggaaagtaatgaactctcttgaagttctttacctctacggtaacaaactgcaaggcgagattccatctttctttggtaacatgtgcgcattgcggagtttagacctctcaaataacaagttgaacggggaattttctagcttcttccgaaattcttcatggtgcaacagagacatatttaaggagttggatttatcttataaccggttgactggcatgttacctaaaagcattggatttctatcagagttggagtatcttatcttggctgggaattctttggagggtgacgtcactgaatcccatctttctaatttttccaaattaagatacttgtacttatcagagagctcgttgtctctgaaatttgtcccgagttgggttcctccattccaattagaatcattgggaatcagatcttgcaagttgggccccacttttcctagttgactcaagactcaaagttcgttgtatgagcttgatatttctgttaacgggattaatgactctgtaccaggttttggaataacttgcaaaatatgggattgttaaatatgtcttccaattatctcattggtgcaattcctaatatatcattgaagcttcctaacagaccgtctatacttctgaattccaatcagtttgagggtaaaattccgtcatttttactacaagcttccgagctgatgctctctgaaaataatttttcagatttgttttcattcttatgtgaccaaagcacagcttcaaatttgggcactttagatgtgtcacacaatcaaataaaggggcaactgccagattgttggaaatcagtaaagcaattactgttccttgatttaagcaagcaataaattgtcagggaagattcctatgtccatgggcgcccttgttaatatggaagtcttggttttacgaaacaatggtttaatgggtgagttgccttcttctttgaagaattgcagcagtttaattatgctggacctgagtgaaaatatgttgtcgggtccaataccatcatggattggagaaagtatgcatcaattgataatcttgaacatgcgaggaaatcacctctccggaaatctacccattcatctctgttatttgaaccgtattcaattgttggatctttcaaggaataatttgtcaagcggaattccatcatgcttaaatgtacccattcatctctgttaaaattttttacaaagaaaaaatatacaactatattaagcataaaaacattactatctaattaattttatcatttatatgaaaataaatatataatttttttattcctaaatactagaaacataaactctttcaaatatattaattagacatttatagaagaaacaaatagatgcattttttaaaatgattttccataattataaatgtacacttacacattacaaatattttattattatctttaatttctttttatctcactttttaccatcacattatattacctattatacatacacttctctttcttttttctttttgtctccctaagtgtcaactaagaattaagatgacatgtattatttttcaatattttttttcataaattttaaggggaccgtaattcttttaacatggtattttaaatacactttgtgaaaaacttgggggccatggtccctgcatgtatacttccattttcaattttatatgaaaaaatataattctgtttatatcttgtaattaatccagcacattaattgctgtaaaaaaaatgctgattgttgcagatgtgctgcaggcttctgatcagagaagaaaccattgttggcagctacaaatgcgagataatttctttaatataggagtttacaatgttttgtatttaagtaatgaactgcaaaatcttgtttccagaaacttagtatgctattgttgtatttattgtataatatatttgtaatgctgtttgtttttcattattgtgcttagatctgtgatatctaaaatttcaccacttcctattcatcttcaacagtgctttctactatattctcctagtgcagctatacttaactgtgaatcaaatttgtgcatgagaagaagaatgcaagataccctatttgttcctagttactaccagtgtatttgcatccttgtgttagaccccctctgtacatgcacttttgctttgccaaaagtagcaagtagagcattaaaaattgcatcaagctagtgttaggttgctggacttatcaaattttatctatttatctcaattatcacgaaaatagaaaagagtatatctgtaaatgaaattcacacaatgaatgctaatttgaaattctctctctaccgttgcaccaatatgagagtgccaattagatcccatcatctagtcctttgacagagtaagtatttcaccaagaccaagactctatgtgggtcccaactaatagttagcttcctttgtcgataaaagtgaagacgtttgaaccaaaagatttttcggaaaaatcgatattaataaactcaacttatttttaattatgctactatttttttaacattcatttttataaaattgatgttaaaataacaacattaaatgtatattttctagtgttatataaagggttcgacaagctagattgagagaaattctgctacgctcattctcctcatgctatttcattgatcaagggtcctatcatcttggctcatcgatatgcttctctcattcgaaatattcagaatatgtaaaaaattattagaaatatttataaagacaatataatgaattaatggttgtatgttagtccctgataaaattgagtggagcttgaagaccaataagtatattacatgaaattagttaaaagaatctctcaataaataatatagttgagaatttgatttttatttgagtctaatagtaatagaatacgaatattgtaaatgttatttttatataataatgatatatataataataattagacaaattatagtgtttattatattcatagtgattgtatgagtatgaaatagtgatatttttgtattataatataaagattatgttttaaataaatagcgtataaactataattttttaaaatttttcacatgtattgaaatatattagtactttaaaataatgataaaaaaagatgatattgtcgtcttctttgttttctaactcttttaatgggttagaaaattaaacacacaatcacatccaaatttaaaagtaatacgactatatagactttgaaattattagtctttgtggaaattttatatcaagacaaattaattaagcttgcattttctgcgctttaaccaaatgactaatgatatttattcatcttagttcttagtatacttttcacagtatgatgtcaattctagaaagacttggaaatattctaacgtgcaaggacttttttatttattggggaccaaagattgtgcaaaaacattagtgtaaaaataaattagtattgcatttcttgtattttgacaaaataacacatcatatttttggtgggtttaaataattgttttttccctataaaattaagaatttctttgcactttaatatataaatattttttatatatattttagtgcttgtaattttaatatttgaatttattgtttgctatcaactatcaataggttactgattatgtaagagtgatgttggtagttcattggcctgtcgacaatatcaatagtttgacatgctattatatgtaaattttttggtaaattgaattattacattttcatatatttaaaataattgatgatgttagatcaacttatgagaaatttaaaaaaaaaacataatttactaaaaataattacatattatttattattaaaatctttataagttaattaacggttaatgtaattccatgttatgtcgtcaattaatatttttacttgacaataaagactaaatattttttttttaaagtttgaccaggactaaaataaaaaactttgaaaaactaaagcagaaaacacactaacgaatagtagtcaaaataatgtttaagccttgtttgtgttaattttacgtagactttttctaagcatggtgctggttaaagtgacaaactcaaataccttttatgggcacctcacgtgtcatttaatgacattacaaaatttcccttgataatgtaaaaatagaatcatatttatattttttatttattaaatttttaacataatttttttgtcgaattatcttcatgatcatgtaattaatatacaaaatcattttattacacaattatataattattgattttttattttaaattctaattttttttcttgaagaatggtaagattttgtaagagtaattttttaagagccatgtcttaattaaagaaaaaaaatcaaatcacaatataataaaatatttattagacgtgattgattaacatggcagtatcaaatgaaacaagaatggtttccctctcatatttttcttttaaaaaaattatatatacaggttaattaattttttatataaaatatatagttatgaaatttattaattaacataattttgtatgtttaagcttgttattattttactcctccactacttattttctggatatgttcatgttaattaatccctattaaatatcttaatccccaacatatgaacacggaagattccagccaaaagatataattgaacacagagaataccaccttttttttttttggtctagaagaataccacctgtttaagagaacatgcatctacaagttattggtggttttttctacttcttatgatagcatagatgaatattattgtggttttttttggtctagaagaataccacctgtttaagagaacatacatctacaagttattggtggtttttttttttgtcttatcagatgaaagtttgaggacacaatttctgcccaaaacataagctcccactatctacttcatcaacagactacatatatgtgatatgattctaaaaagaaaacatgtataaacagccagttcaattaaatccaagcaattgttttccaagtctgccaacccttaaaatatgggttagaaaattaagctcgccaatcacatcaaaaaggaaaattaaaacacgtccacaaaaatatttaaatcaaaagaaaattaaaggaaactcacgctgatacattagtttgtggaaaaattctgtcttcacggtattctttttccatactagggtccgttggctgatacatcagctaatcgctatcaatgcaagtttcaatatatcaaccaaatattgagataaatgccacaaaatcaaaaataaaaaagaaccccgtgcatttacattatctgaaattctttgaatgctatctggtccaagagaaaattccaaaagcaaatttattttaaaggatataaaaatacaataaaaaatattttggcactaggaaatatgtaaaatgaacaaataatgagagaagtatttttctttacaatatagcatgctagacagaattatcaattgttaatgacagagagctctaaactaagaaaaagactctcaagtcaattgtctttcctctcaatattttatcctgaataactatataagtgatttttacatcatattttaacctaaaaaatcataaggctcatgttaatgattttttcctcacttattatatgatacttaactttttcatttctatctgatgtgagatttctcctcacatttgtactttaatagtctttttctcattttgtgtttttcccacatgttagcctttccctcgagcgaaagtcattttcaatccaagaatactcattggtgacccttagagcttaatcgtttttgcccccggcttgtttagccattgccacaacatgttctagtatcttgtactattgtaacacctgcaactttgctacctgacattcatgcatgaattcacccgttagaaagatttttgatgcaaggaactctatatccatgaatccatcaacgtcatcttactcgtctaaactagtcactaagtcaaaccattgactctgatatcaaattttttgaaaaatccaagagagtaaatactagagaaattttccacaataggtcaccaaacaaattacataagtaaacttgatatcatatcttagaattctaacacttatttttgaataaaaaacctgtaggtggattctagaataattttaatagcataagagataggcaaaaccaaaacatagttttagttcacaaactaaacaggatctagacttgtatgtgagccccttttttatgctcattcaaccctgctcttagatattaacttatttataagtaaaaatcagaatgcaggggagagtgaatatgatacggcttaccagtaggaagagaacttctaagaacacctgagaagtgtaatgtacaacaagaatacagtttcttgggaatcaattttcaatttcccatgaatttagatagcgaactagtaattattataatttcgaaaacaaaattggtcagaatatcaacatgtcctcacttatacaaactcaatcgatggaacaaaaaaacaaaattcctgatcaattttcattccatgtctggagcaaaagtacttccacaacagcaatgggaacaaaatagcgtgcataatgcaaaatggtattaatgactgctagaattttgtaatatgcagcatataacaaaggtttggaggatgctattgctgttattatcaaaatagcaatgcctagctattgattctcgggattgtaatttatttttgcttatttagtacctttttgtgttgagaatttcttcctctcaataatagggcaaaagtttacattgtgttgagaatttcttcctcacaataataacaagattgattgttgacaatttggaaactcttattttaatctatgataacatattctgatccatgtgagttaagggagaaaaattaattaaaatttaggtgtgctctatagtaataggatttggtgctctgttttattcaaattcagctgaaaagttcatgatgtgacattttgttgttaggtccaataaaatattgttctagagggttctagtagtttcggtgatgtcttatatgttttacaacttctgtttttattttatattttcgcttctctgaacttgtcttggtttttaactcaaacgagatgacttctttatatttaaaagagaaaaaattcttatctgctcagttacagacatcggttatgatatctacatgtgaataataaattcagttatcaagatgattttgtatgctctttttccaatctactctgcatgtcttataaatattctgcactttaattgtataattttcatatcatgttttagagctgacactttttgttatattttgtttccacaaaataagaaccatatatgacagaaagcttttttttctttatttggagctaagggtagtatgacaaaagtttctgtaaaaatatgtgtaaaattcataggctctttgatattagaccttaaaaatggttggacaagaaataaaatgaagtgaagatagctggatgttagaccaacttcatttgcacacctttgttgataagaagtatagctgaatcaaggtagagccttagaggacgaggagaacctcaatagacagctatgacaccagcatgttgatgtaataattgtctaatttgcactgaacactttgatgataaaaacaaaagcatttttaattattaaattaccaacaaatcagtgtaattaaagagaaatgctaatgtaattataatcattattttgtaggtcgtaaagctgagtatttaaattttgcaggcttaaataagtagtcggaacatactagcctgatcaacaaacataattttgatatctggcattcttgaaaagagattatacaataaaaagacaatcaaaatcaataggtttttccaaacacttattttgcattgcatagcaaacatcgatcaatactacatagtacatatcgtaaaccttcagctattcatgaagctttcaccccggattgaaattttgaagctaatacgccataaactgcaaattacgtgctacatatcagattacatatattaatggaaatggagaagaattagaaaacgatttttcgtagtagattaaatgaactggaaatctagttatatagccattcaagtacacaaatgtgcatagctgtaagcattttttcatgaggtttaaacttcaaacattagacatatcatttaaaaaaaaaatctctaaacagagaacatgcaccagcatctaaacaatttctttaacaagaaaaatagtaatcatctttttcgataaagtaactactattagtgaaggcacaaattaaagaaacagaaggaaagtaactattagtaaacactatgaagttccaaagggtgaagttattggaattacgtacctactagcctttgaaccacatatggcacttggccatgttcacttccaccattagaagtatatagtctgtgagtctgatcaagaatctttggtaagcaattctccatggtttccaaagtagtattggccctaataagccccaaaagcctgtgaagaatcctaggcccaagctcatatataatgctccatagaatattgaatcttcatcttcaccatcaactgcttctccttcaggcgtccctattggcttatctccaggacaacttttgttaagttgttgaccacaaagattcgtatttccttcaaaactagagccatcaaaggtttgcaactgtcttccccaagggattcttccattgagatcgttgtttgataagtctaagacagcaagacggtcaattttggaaagagtagatggaatttttcctgagatatgatttcttgataagtcaagaaattctaacgaatttaaattcccaatctcagaaggaatttgtccatgtaagttgtttcttgataaattcaaagataccaatccaagtaaatatccaagctcttttggtacttcacctgttaaatcattacttgagagatcaatgctctttagaagattctctggattccaatacatatgatcctgacctttccacatcaataacacattagagtcataaatgagaggggagattgatgtagatgatattcttcgccccattacaatttgacttgtgattactctgctttccatcatcgcagtatagttccttagacaagttggaattccttttgacaagttatttcttgaaagatccaagatatgaatttgcctcaaataacagagatgaacaggaacacttccattaaagtggtttacactcaagctcaagatttgtaattgttgtaaactttgtccaatccatgacggtattggaccagacaacaaattttcactcaagtctagtatatctaaacgagtgcagttcttcaaggtgaatggtaggtctccaataaaattgttgtgtcttaagaccaaagcttccaaattaacaagtgtacccatggactgtggaatcttgcctgacaatttattattgctcagatcaagaaattctaatgtatttagatgttcccaacagttgggcagtctatgtctaattaagctctcggtcttccgtttttgcaattttatttcgtagaaagaagccaaatttgaagatacaacatttgatactataactgtttggtgttttgaaaatctcactgacatatttccaaatgttacaaaagaatttgattcagtggtttttacgaattccttcctagccttttttaccaagtcagggaatttgcattgttgtgcatgatggctgccacaaggaccattgtaccaacccattagtgcaagtggttttttcttatgagaattgagaaacaaattatatatgtgttttataaagggaattctattatttttaattttgaacttgtaatgttttttgtttccctcacagaacaagtgatgtgactcttgatcgacgccatacgtacgcataatttgatgctcttttttcacaccacttttatcttaatggtatctcaagttgacagtcataaattaaaatagctaactatagttgattagtagagacaaacagctcaaagataaagatctttaagccatcattttttttttccttttcttttctatgaactgtcatttcttatctctacatggaatgtctagaagttgaaaattacttgagctttctttacctactgctttccattttggcgaactgcttttctttctcataatgaactttccacttccaatgatggttcaacattaataattcttgcttttctttctcataatgaactttccacttccaatgatggttgaacattaataattcttcatctattttgtctaaaactttctccattcattgcaagttgtaagcagaatgtagaatgtacgtataataaaataatgagaatggcaactgctagtactacttaattagaacaaaagtatcaaaattaaaacgaaaataactttgatgctgttaatatatgagtttaattttgatagatagtgtaaaaatttaaattgttaattaattagaaatcaccaaatgatttgtaaaacaattactaaaaaagttataggaaatatatataattaattaattgcaaatgaaagtgtatttaaattaaattcttaattaacatatccttattgtgatattttgtatattttttatttaattgagacagtggaatgagaccgcactataattttcatcacgggtgtggttgtcaaatataatagggatggttggtgaggaattttggaatgttagttggttttagactatatatccttttgttcagttttcacattctcattagagttaagttgcttttggggaagaaccaatgtcttgaaattccctcttcaccagaagcagttttattgtgtctttatcgaagtcatcttctccagagacttgccttttaactttgaagataggaaatagatcagtcaaacattgtttcagtttatttggattttttttttttgcttgggaaaatatgaaaaatacactcaggatcaggtcctgttcacaagaaatgtttaagtctatcccacacatgaaatgcttaattatttaagcctaataaattaataatatttttgtttcataataaatatttttcatttattattaatacagactaaaataaaactcactaatttattaggaaataaatatgatttttttaaatttattagaaactaaaataaaatatcaaggataaaaaataaaaagtgctaatttattagcaactcattataaaataaaaatttattagaaaacaattaaaagattaagtatttattaggaataaaaacatatttaatttgatttagtatttaacattgttttcgtctatctgtattataatgttttttatagttgtttcatttcaaatttgtgacaacattttcattgggacccttcatcagcaaattggacactaaagagactcattcaggaacaaataactactaggggtacaataaaatgagaggatttaacacttttgcagtaggaaaatgtactttaacaaaataaaattatgtgtttattcttgatatatatatttaactcactaggggtacttttgtgtttgatgtttgataatatttttctataaataaaatctttaatatttaaacaatattattttaaatctctatagttagtttaataatatgatttgatttgtagcaagtgaaaaattagtttaacaatattattttaaatctctattagtttaacaatattattttaaatctctatatttatttgaaacatgtcctccaccccgtgtctatgcctggttaacccacaatttgaaggacatgtgatttacaaagacttgttacaactcacaacctttggaatttctctatgcctggttaacccacacttttctaaaatattattttttatattaaaatttattaaaataaaaaaattatatgtttatccatgaacactaagctctagacaaaaaaaaaaaaaaaaaaaccacgagaaatagtatataactctttagtggacaattggtgttgtacaaaattgaaatgatccagactaagtcaagaaactggtcttcttcattgaactcacagtgaaaccacagaatttattttcatctactagtttccttcccaattcccatgttttctaaaacataacacactacagaaccttctaataaattaaaacaaaaaaaccaatattttacatgtagcaccacaacctaacaatttctacctacaactttttctatagactataatataatctatctccactcattcattcatcaagattgagaaatggattcaaatgcttgtctaccacacttgctagtgttagcaataacattggtattggttagtcatgcaatgggagattcagctaaagacaaacagagatgtgcagaatccctgacaggtgttgcaacgtgtctgccatatttgggtgctgacgcgaaagcacccacagcagattgttgcagtggtctcacacaagctaaaagtaccaaaaaataactcaaatactacctatatattaccattttcatatcacgttgaaatgtaaaccattgattagttgatagtgtaaaaaatatttacactcttgagtgtactaaatctctgacagactcacaatagatattattgcaaaacctttcggagatttattttttgtttttaatactagcctagagtctacagatcaaagttaattaattgctgaaaattatgttcattctcattcttggcgctgttagtccagtgtgaaaacggacaaattcagtttcatgttatatatggctctgtatatgaaaaggaaattaaagaaaaagtagaatttgattatggctaatttcacgcattatatttattacaagaaaacctttagataaaaattattttttggtacttttagcttggtcgtaaacattaacattacatcacgcacacaaacataaaaggcaaaccaaattattttatatccctaaattttatgaggaaggatgctataaatattaacaatacatctcacacacacaaagacaactaaaattatatcactaaattgaggtggggatagttttgaaaaaaaaaatagttggtgtggttgtgtaggtgtgtttttatgtttttcaattcaggatattaaatttacaaataattttatgtttttcaattagattttaacaataattaagaaataaatctaaatcattatacatttgtttataggtacttggcatattggagatgttatatgggaatctaaattttgcttaacacaaatgtggtatatgcaaggaaaaatcaaattgaaaaatttttaaccaccacttcaaattttaaaagatttgtttcaaaataaggatatgaagaacaaattgtttttacagaacattccctccatgatgttttcctttccgttaggtgaaaaaaatagacatttccaaaaataatggaagtgaaccttatataatgctgtttatatagagaagtctttcaaaatacaagttaaagtactattactacaaactattttgtatcatatatcgcttatatattttgatataaaacatttaataatttttttttatttcttagtaacatgtacatgaaagtcaatccaaaccgaatcgaggatttatgtggcatttaacttttatcactttctgccctcaaagatcacactctaatcatgtaccaacattttgtggtgtacaagaaaactcttctatttgagagcagacgatttttatttgaacctcttttggcaaatggaactagctttggattaccatgtgacaaaaaactactttggattaccatgtgacgatttttatttgagagcagacgatttttatttgaacctcttcactgttttttatcaatattaccaaaatttccttaaagtgttcaatatttcgtaatcttcataattaattcaaaattctcaaaagattagtatatgaccttttttcttgtttgtactaggagaggaataaatgaaaaaaattcagaaatttgtggattgcaatttgctcaaatgatgtgtctattagttctttgaaatttgtatatattgatcatatttatttttaccttttaatagatatattgtgctgtcatcccaagagaaggatcaaacattgatgatgcagatgtgctaagatattgcaagaagaatcttgcatctttcaaagtccctaaaaaggttttcattactgattctttgcccaagactgccaccggaaagattttgcgtcgtcttgtggcagaacacattgtctctcaaatttgagcaactgatcaagtcatacttttgaagcctccatacctggccatacatagttggagtccacacaccataaatttcaacaataatttggcaacttggcatttaagaggagggtaattctgcaaatggtctttcattcaggatacaatagattgtagttttcaatgattcacgtgaaatgttcacaatgtaatgttttcaatgttttataggtcttaaataccaatagcagacaagatcatgcttatgcttttttgctatcgtgctcctgttccttgccactggtcttgatgaagccaagcattgtctctttgccttttaagttgtacatagttgcaaaacgggtacatgtgaaagaataatgcttattaaaggtaaggttgattttaaagtgggcatgcaagaatgcattcattatctcaagtaaataaattcaagcgaatatgtgatttggattagagaatagtattatccagtgcacactaaattggagagattcccaacatgtggtttcaaaactaaaagtacttaccaactatttgaattttaatctatgtgttctagctaatgttttctatcacagaattacaactagttgatcttaagaacaaaactatactaaatatgcaaatctttacatctaaaaacagaatttaaataaggctctcaaatttgaagaaaaaaaagaagatagcaatgactacaaattgatcaatctgccaatacaatgataaaacattggtttattctaagcaacactaaaaagtgatactacatgagcaaaaagattgaaattattgaccatgcagtatgagtgtacagcattatttatttaatttttcaaatacaattttattttatattaatacaaaaactctcacaaaacaacttcttaactactagttaattactacttttatgcataaaaaaactagttaattactactgctacatagcagaaattccttcattcttcgagaattatattccttagtttcacgtggtttgcctcagttgtttgccgcaggtttcagtatatccttaattaggaatcgtcgattgtcaaatcgttgttaaataaaggcgctatatataattttagtattttgacgtttttaaatgaatttcttatttatgattatatatttacaatttttaatttcacttaaaaaaattgaggtttttttttatttacagagaaaaaaatagagtttttagttaacacactgttactatatagtgcggagacaattaccccacaagcttttcattaacttgtcataatataatatatgtgaatacaaactgtccctataatttaaaatgaaataaataaaaagtcaataactttataagtattgtctccacacatatatattatcctataatttacaatttttatatttattattgatattcttaattaactaagtaaaaatatttttttataatttttaagataattattataaatattaataaatttattataaataacatttttatatgtgtaagtgcatgtatattatttattgaaatattttattttaatttttcattaaaaatactaaatttattaacatgatacgtgcctcgttagagcagtggtttaatttaatctgatagtgagaactgaattgacagcaaattccctttactgtgtgatgaaagagttgtacgaaatctttatgacatcagcccccaacatgagtggcccagtggacaagcccatcaatctaacatgtcggttgatagcacttgcataaacttttgttccttgcatcatctcatgtgtctccattctccattctctgcttccactaacgattaaacctcattgattagggttcaatgatttttcaatgaataaaattaattttaaattcttgattctaacagctcacgtatagtctgttgaatcaaatggattagactcttgatatcataaagaaaattaaaatttgattctttgtgtaaaataaagaaatctaattaattatgcttgttatgttactatatatatcatttttccggtgtggagtaacatcaaaatcaaagtaacaaagttacttgcatgttactctaaccataattccagctaagtcgaatatggtttcatgttttgtaaaacaatttagatcccctttatcaaattgtatatgtcttttacacaagttttttcactttattttattacccccaaaatcaattgttgtgttattcatactattaaaaagagagattgaatattaaatgataaaaatataaaataattgttttgtattggcagagtacacatatatatgcccaaatgtagattcaaagttcaaacattttgggcctagatcatccctcctagtcatagccatctgaattggatcgaccccaccccaaggtttgtgttgcatcacttgcatgcattcacccaccacagttgttgttatagttttctcgtgatttttgtattggaaaatactatggacaaatataattgatacagtcataattaattattgtcatgttgcaattacaaagactcctcaaagaaaatgtttagtaaatcatgatcaagtagaaattgcaatggcaaactgttttttaaaatcttattagtcagttgtataaacccaaatttagttatatccaggtatgtaatatttgccattttagtgctctgtttggaaatttgcgtgtcgaattgttttttttatacgtacctacacaacactctttagccaaataccacttttcatggaggaatctgtcctgaaaggagtatagaacaagaaacaatatgcgtggttgtatctatcattctgaaaaaagagaaaaagtgagatacgtacaatagtaggactgtgacactactagaaaaatgtatgcacctttcatgtccctaaatttatgaacaaaagattcaggtgtcgtttattgaatttgttttatatggagtgtaaagtcatatccaatactaataagtgtatgtttatataattctttcaaaaataattactcttctttatttacatctaataaaaatgttattacattaatttttaaaataagctaaatgaagcatgtttcataagaaattaacttttactgtaattgttacattttttagtaacaaagggagatgggtgaaggaaaaaaaatgaagataatgtctatgttgttcaaataacagtattaattgtattaaaatagttaatattaaaaaatatattagtaaatataacattgttgtgttggtgctatttattgtgcatcaaaatatgtaaaaataataattaacttgtaatttgtatagttggtatgggttgttttatctatcctggattttgttgtatcacacatataatcatttatatatatatatgggctactattgtcactaccaaaaatgctattgagactaccaaagcatttgaaattacttggttatccttagttccattcccccacacctcctatccttcccctctttacgttcagctactctccctctttacatccaaaaacagaatttaaataaggctctcaaatttgaaaaaaaaaaagaagatagcaatgactacaaatttatcaagctgccaatacaatgataaaacttcggagtattctaagcaacactaaacagtgatactacctgagcgaaaagattgaagtttgaaccacgcatgatcaaggaaatgaaaataggcataccgccatgatctacaaatcagcaaaggagcaatcactatccagaatcccacaataaatccaattgtcatactgacaaaaaaccaattcactccatgcccatcacttccttcataactatgggttttcccattggagctgcagtttatgggcagtggtggaccacatagattgttgccgatgaagctggaggcatcaaaggtttgccattgagttcctgttggaatatttccccttcaaatgaattgtaagacaagtctagcatgctcannnnnnnnnnnnnnnnnnnnnnnnnnnnnnnnnnnnnnnnnnnnnnnnnnnnnnnnnnnnnnnnnnnnnnnnnnnnnnnnnnnnnnnnnnnnnnnnnnnnnnnnnnnnnnnnnnnnnnnnnnnnnnnnnnnnnnnnnnnnnnnnnnnnnnnnnnnnnnnnnnnnnnnnnnnnnnnnnnnnnnnnnnnnnnnnnnnnnnnnnnnnnnnnnnnnnnnnnnnnnnnnnnnnnnnnnnnnnnnnnnnnnnnnnnnnnnnnnnnnnnnnnnnnnnnnnnnnnnnnnnnnnnnnnnnnnnnnnnnnnnnnnnnnnnnnnnnnnnnnnnnnnnnnnnnnnnnnnnnnnnnnnnnttcattagtgtcatggcactcaagttactgaaacagctgggtatatgccagacagatgttttgtgcaaggtctaaaactgaagatgactcatctgacatatttcattggaatgtggccgccaaatctgtttgatcgaaggcggaggattttcacatttaagaggttttctccaacccatgttggaatagttcctgaaagattattttccccaaggtccaaggatatcaattggttattcttcttcaaactggttggaaatattccagagagtgtgttgttacgaatttgtaaagactgcagctctgccaaggaacccatggattggggtaagttcccaacaaaatggttgctttgtaaatttacatccaccagaagtgtccaattcatccagcaatcaggtatctctcctgacaaattatttgatgcaagattcagaaattctaatcccattggctcgtcctgatcgttacataaaaagtcattcatggattcagagaatgaattgcttgaaagatctaaccaaaacacatcacttgaaagatagggtaatttaccacacaagtgatttgagcttagatcaatagttgggatagatattggattctttaatgtagtcccaatctcaccatggatatgattacgagagaggtttaaatacgaaacctgagaaagtgcttcccacatctgtgtgggaatagaatcgaaaatccccgtgttagatagtccaacatatggaagttggttttgtgactgaatccacaatggaaagctgggacctaactgccatgatgtcacttccaaataggtaagttgaaaattaggaatccaattgggacccacttttaaagttaaattgttccccgatgcgacaaactccatcaagcttgtaagatttgcaagatcatcttccttgacaactccgtgaaaaagattgccgtcaatatcaagagataacaatttagagagtgatcgaagactttcaaatggatttccactgaatttattgatagagagatcgagatatcttaatgatgaaagttttccaaatgatctaggaagagcaccaccaattgagttgttgtaaaaccgtagctgctcaatatttttaaatgccccaatatgatctgtcagattgcctgaaagtcgtgaactctgaactgcaagtcttgtgagtccatgggaaatacaaggagcaagaatttctaaaagctcattaacctgttggttgagtttgagatatgataaatctatcacccttaagttgcagagattacccaaagaagttggaatgtttccttcaagttgactatatgacaaatcaagttcaacaagagaagtcaaattacccaaagaagttggaatgtttccttcaagttgattacctgataaatcaagttcaacaagagaagtcaaatttcccaaggcatcagaaatagtcccatgcaagtcgcaggaacttaggtccaaagacttgagacgatgaagaccgtataagcaatcaggtatagaagttgagaatgaatttccagacaagtcaagattttgaagaagtgtgaggtttcgaataccaccaggaatcggaccattgatttcattatatgataattgaagagaaacaagtttcttcaatttgaatatccacttggggacaaaagaaatggcaggggaataactagtatcggaaagatggagagtttgcagagatgagaagttgagcaaggatggttcattatagtgagggagtgtgcatccatacaaatataggtgggtcaaagaaggaagagattggagagtgtgtagccaatgaaatgctttggataggtttgcataactcaaatgaagatattcaagcttccacatacttgatagccattctacattttcagcaaacagaggttcgacaacataatcacctccaaggccaagatacaccaaattggagagattcccaatctgagatggaattgtttgattggcggcatacgccaggtcaagatacaccaaattggagagattccaaatctgagatggaatcttccccatgaatcgagtataagagaggtcgaggtgagtcaaggaagtcattgtcccgaggaaagaaggaattgacatacctcctccaagtaaataattgccgctcaagtcaagatatcgaagcttagagagattcccaatctgaggaggaatcttcccattgaatccagtatgagagaggttgaggtgagtcaaggaagtcattgtcccaaggaaagaaggaattgacgtaccttctccaagtaaataattgccgctcaagtccaagtaattcaaatgctttaaatcagccaaacaaggacttatctctccaccaaagctccatctcctataagcttcctcatcgaagagatagtggtaatcatagtgatactcgaaagcagaaaacgtagtgttgaggtgaagctgaagaagatgggaagtgacgttgtggcagaggactccataccagtggcaacagttggaattattatgattccaagaccaaagcctattggaaggatcattgagattattcttaaacttgaaaagtgtctcacgctcacttgggatgcacacactctctctgcatggtaagctcaacaaccaaagctggacaaagacaagaatataaatggaggaggaattcatgatcacacaagaatatatagaaaacaagtgtagttgttggttctgcatataaatcatcaaacttctattatttatactgctgccctgccctgtttttttcttcactttcattattttttaccttttttattattgcgccaaatactaaattattcttccattctttttttacgctggcctctttaaattatcaatttaattatccaattctcccgaattattctcccaaattaattttgatcaatttttcaattcacaaaataatattcttcttatatgtgaaaaagactaattaatcttcattgtcattaatgattgttgtgttgtctatttctaattgttttttaatcataatattattttctttttattaaaaattaattagtgagatacaaagaagtttaatttgatctatcataattattgagatcatagtttcttcttttataagtcttggtccaaatttctccatgtattgtagatcatatttaacttaaaaagtaaattagaagatctacaaagaagtgtgacatgttttttaaattataaaattatggtcctagctatttattgttagaccacaagttttcatatattaaagtttttgtctaaatttcatttatggtgatagtttacgaataggatagaagacaaaaataaatattcaatttattgaaatatctaactcaattaattgatgaatacatcaattataggaaaagggtgtactttaaagactatttctattaaaaaatatataattttttttccttccaatctaattatttaattttaatcaattttttagttcacaaaataatattctcttatataggaaaaaaagactagatttaattatcatcaattggaaaagttattgtgtcatctatttatagttgtattctaacttgaatattattttatttatcatataaaaattaattatttatataaaagaagtgaaaataatattaactttttttctcaaaaaaaaatcagtatcatattttatattttttacaagttatcaacttaaataagaggagaaacataattttaatttccattttactttttaaataattgcaagtgtcaaatttaaataatcatgagaatactcacgttcaatataatattctcaaaaaaaaaaatccatacaataacttaaacaatctataaagaaataatttattcttgtgccaaatactaaaacaagaaacattttttattttagtttaccgtatagaattgtttaaatcaatgaaatttttattttaagaaaatattaatgatttttacatcaaaggtaattaaatttggcttaattaatcttcaaattttaactattattcaaatcaatcctttcgttaaacctgtacatgttaagtaaacaacaaaaagtcttgccttataaaattcaaacattttattacatgtggtttgaacccataattaattttaaactatcaaattttaattattcaaaataaaagaaatgaaaacaaaattgtctcctagacaaaccgctgaccacctgattgttgccatttatttcttttactcttttttttttggttcttttattttgtccaactttaactttaactttaattagtgaggctcacgcggatttgtgctttttaaactttcttttcattttaccttactttctgtgtaacaaccaagaggaaacattcaacacgcaaagatgaattcaaaattcaacacggattcaaattatttaaagaccactgtgtagcagcaattgtttatgaagtttcaaattatttaaagaccactgtgcaagaagaaacattcaacaggcaaagatgaatacaaaatttcatttttaaagatcactctgtaaaagagacgacgtctaaggtggatcattgttggaaacaaatttggcagctgtttttttattatcttgtacaatccccagcgttttctctgaaaactaaaccttggccaattctgaacaaatgaattatgatcggtttggttttgtatattttttttcatctcaaactatttttttttatgagaactaaataagaattaaataaataattaaacaaattcaaaatgtcacattttctagactcttcccactactcaaatctcacattaattaaatcattcatttctaaactcactactatcctaaagtagtaaagtccctctcatccttcataattccctttaaatctattgagtaaagatagagacagaataaagaataattcgaataaagacagtaatggccgatggcgtgccgttttgtgcattatatgatgtggtccacaatttgaaacatatataaattatattatatatgtctaatttatattatggaaaatcataataaaggtctaattatattattgaaaatactatttttacatttcacaagataaatgtcttatttattatgtctaatataaattatactagataaatgtctaatttatattattgaagttcaatgaataaatatttttgcatatataaaattatatcttggattttataacaaacaatttaaattgtgaaaataaattacccttcaccagcagcaaggtcgaagtagagatcaagaatgttggggcagcttttgtagcactgagggaagcaaaggttttgtgtgaaaccactttccataagagaattgatgagattccaaagcatttctcactttcagtatgccccttaatttgtttttcagccgaagtcctgcacgtgtaagcttcttcccctgttctcttcacatgctaagaacatatttttaaagggaaattcttgttgttaagaatttgtacgtgtatgcaacacttttgaactccgtcaaagattttttttttttaaattaacatttccaccaataatatgcaaacacgtttgtcttgggttggcgcaaaaaattctcgtgctctatagaaatttgaaatatggatctacgtttaacttccttgaatgaaagaaatatgtaaagggtacgatgtaaaatttacccacggacttaacttaaatgtggttgtaattaattatttttttagagaaaaatgattatgtaaaaaaatttgcacaattatttaaatacaatttattatatataatacattttttattaattattttaaaataattcagatcatgatttatgattaaatgattatataaaattattttatatggttagtatattgacattaaacttttatttttaaatgataaaacttaaatataatatttaagatattttgacagtgttctttagtcaaaattagaatttaatcttggtaatctttataataagtattttcattaaatatcaagatattttattgaggtataactccaatctactactgatgagaaaacaaaactatatataattccaatcccatttttaatcaattaggagttacatccctttaaaaaatccagacttttcaatgactaacaccctttttctatgcaatatacaaggatcaagtttgaatgtacaatcttgggatggaaatcaaattcgtatttggttgacgatatttaaaaagtagtcattcttttcttacagctttctgtcagaaaattgtaaattaaatcaaacatggatagaatatgctggaagccgtaaatgagtatttaattaagaagttgattggctttaaaaacttacaagagttccttattatataaaacttgaaaaagcaaaacgaataatacttaaaaagttacacctattatttgccctttttatagttatggtaatttagaatattactccaacaattttgttggttctcaagcatcattggttatctatggatatctcatcaaagttcttggcctggccggcttggagagtcaagtcttgtatgcagccacgagtcacgactttaattaacacgaaagaactaattattcacttcaatggttagtgactaaaattaaatataagtttttttcctattaaaccacgttttcttgaaccactagtcccccatttttggaaacaagaatgtgatacacagaattgaacaactagttgatcttaactacaaatatgctcaatatgcaaatatgtacatcccaaaacagaatttaaataagactctcaaatttaaaaaaaaaaaaagaaagaaagaagatagcaataactacaatgcaaattgaacaacctggcaatacaatgatacaacattggttgtaagcaacactaaacagtgatactatacgaggaaaaagattgaagtttgaaccacacatgatcaaggaaatgaaaataggcatgccgccatgatctacaaatcagcaaaggagcaatcactatccaaagtcccacaacaaatccaattgtcgcactaacaaaaaaccaattcactccatgcccatgacttccttcataactatgagttttcccattggagctgcagtttatgggcagtggtggaccacatagattgttgccaataaatctggaggcatcaaaggtttgcaattgagttcctgttggaatttttcccttcaaatgattataagacacgtctagcatgctcaaaaagctcaaattagaaatggttggagggatttcaccagaaatttgattccttgaaagatcaatggtttgtaacgatcccatattaccaataccttctggaataggaccaatcaattggttgtgggacaagttcaaaaagttcaatccatttagatctgtgatttctctaggaatatctcctaataatttgttacttgacagatcaatacttgttaccaaacccagaatgtttcgatactcatctcctcttccttttagccatagtagcacactaactatacctgataccgaagagtaatatgtatcatttggtgcatgagaatagatacggggatatgtactccggttcactagtgtcatggcactcaagttacggaaacagctgggtatattgccagaaaaattattttttgcaaggtctaaaacctgaagaagactcatctgacatatttcatttggaatgtgaccggaaaaactgtttgatcgaaggcggaggattttcatatttgagagcttttctccaacccatgttggaatacatcctgaaagattattttctccaagatccaaggatatcaattggctagtcttcttcaaactggtaggaaatattcccgagagcaagttgttacgaatttctaatgactgcagctcagccaaggaacccatggatggggggaagttcccaacaaaatggttgctttgtaaattcacttccactagaaatggccaattaatccaacaatcaggtatttctcctgacagattattggatgcaagattgagaaattctaattgcattggcttgtcctgattgttacataaaaaatcttgcatggattcagagaatgaattggttgaaaggtctaagtcatacacatcatttgaaagatagggtaatttaccacataagtgatttgtgcttagatcaacagtttggatagatattggattttttattgtagtcacaagctcaccacggatatgattatgagagaggtttaaatacaaaacctgagaatgtgcttcccagaaccaagtgggaatagaatcgaaaatccccgtgttagatagtccaacatatttaagtttgttttgtgactgaatccacaatggaaagctgggacctaactgccatgatgtcacttccaaataggtaagttgaaaattaggaatccaattgggacccacttttaaagtgaaattgtttcccgatgcaccaaaatccgtcaagcttgtaagatttgcaagatcatcttccttgacaactccttgaaaattattgccatcaatccaaagagatgacaatttagagagtgatccaagactttcaaatggatttccactgaatttattaatagagagatcgagatatgttaaatctatctcccttgagttgcggagatttcccaaaaaagtcggaattgttccttcaagttgattatatgacaaataaagtgcaacaagagaagtcaaatttcccaaagaagttggaatggttccttcaagttgattgtatgacaaatcaagttcaacaagagaagtcaaatttcccagggcatcagaaatagtcccatgcaagttgctggatcttaggtccaaagacttgagacgatgaagaccgtataagcaatcaggtatagaagatgagaatgaatttccagacaagtcaagattttgaagaagtgtgaggtttcggataccacaaggaatcggaccttggaatttattaccccgtaattgaagagaaacaagtttcttcaatttgaatatccacttggggacaaaagaaatggcaggggaataactagtattgtaaagaatgagagtttgcagagatgagaagttgagcaaggatggttcattatagtgagggagtgtgcagtgtgacaaatataggtgggtcaaagaaggaagagattggagagtgtgtagccaatgaaatgctttggataggtttgcattactcaaatcaagatattcaagcttccacatacttgatagccattctacattttcagcaaacagaggaggttcgaaatcagaataacctccaaggccaagatacaccaaattggagagattcccaatctgagatggaatcttcccatggaatagagtataagagaggtcgaggtgagtcaaggaggtcattgcacaaaggaaagaaggaattgccataccttcaaaataattggcgctcaagtcaagatatcgaagcttagagagattcccgatctgagagggtactgttccgttggcaacatctgaactcaggtcaagatacaccaaatttgagagattcccaatctgaggaggaatcttcccacggaatccagtaagagagaggttgaggtgagtcaaggaagtcattgtcccaaggaaagaaggaattgacataccttctccaaggaatacattggcgctcaagtccaagtaattcaaatgctttaaatcagccaaacaaggacttatctctccaccaaagctccatctcctataagcttcccaatcatcattgaaaagagaatctgaagagttgaggtgaagctgaagaagatgggaagtgacgttgtggcagaggactccataccagtggcaacagttggtatgattatgattccaagaccaaagcctatttgaaggatcattcagattattcttaaacttcaaaagtgtctcacgctcacttgggatgcacacactctctctgcatggtaagctgaacaaccaaagctggacaaagacaagaatataaataatggacgaggaattcatgatcacaaaacgcaaatatagaaaacgagtgtagttgttggttctgcatataaatcatcaaacttctattatttatactgctgccctgcctgtttttttcttcactttcattattttttaccttttctattattgtgccaaatactaaaatatttttttaatattttgattcacttcttagaacggtttccttttatactgatgcaagtgtctttcttttctttttctttttttgacgtttccttttttaatctgatttattatccaattctcccgacttaattcttagaataggaaatacttattttattaaaatcaatcaattttattgtatttcttgatttcttcaaaataacttttaaaggacaaaatattgtaattaaaaaacaagaatttgatcaaatggactaaaatgacatattttttaaaaatatctcaattaaaaaataaaaagactaaaattacaagattttttaaaaataaaagataaaatatttaaattaaaaaataaaaaactaaaataacatattaaaaaaaagacgacaattatattttaagcctgtttttttcttcactttcattatttttttacctcttttttttattattgtgccaaatactaaaatatttttttaacattttaattcacttcttcttttaagctggctttttaaatttatcgacttaattatccaattctcccgaattaattcttagaatacaaaaaattatgcatttatcgtatctatctccttttttaaaattcctatgtacactaaattcataaaaaaaaaaatcaaaattaatagcaaagaaatatgatttattcttgtgctgaatactaaaataagaaacattccttttggtacagtttttcttacaaaaaaataaataagaatcattttattttaatttaccctatagaacttaaatgaaaatttggtgtcattaaactgaaaattttaactattatttaatcaatcttttcgttaaacttttgttacataaacaataaaagtccaaatttttttaaaaaacaaaaaatcaagtcttctatttcatgatatgccaagccatagttaatatgaaattattaaattttcaatattcaaactaaaaataatgtaaaagaaaattgtcttctaaattaaccatatatagcccacaccatcaagtccatctcgagatttttcatttgttcatcttgaaccctttggacactccacaaagtccatccatgttatggtttgacttcttcaactttaaccgtaggtcactgcattaccttcctatcaagttccctgtcattcacaacaaatgttgcaagttatgtcaagcaagaaaaaatatatataattgatgaataaatcaattataggaaaatggtgtcctttaaagactatttcagttaaaaaatctataaaaaaaaaagaagattctcttgttccaatctagctatttaattttgatcaattttttcacttcacaaaataatattctcttatatatgaaaaaagattaaatttaattgtcatcaattggaaaggttgttgtgtcatgtatttctaattgtattcaaacctgaatattattttctttatcatagaaaaattaattagttttataaaaagaatattaactttttttttctcaaaaaaatcagtatcgtattttgtattttttacaagatatcaacataaataagaggagaaacataattttaatttccattttactttttaaataattgcaagtgccaaatttaaacaatcataaaaatactcaagttcaatttaatattctaaaaaaaacaaattcatacaataacttaaacaatctacaaagaaatataatttattcctatgccaaatactaaaataagaaacatttttttattttagtttaccgtatataatttcttaaatcaatgaaaaatttatcttacgaaaatattaataattcttttaatctttgagtagtttacatcaaatccttttgttacacctgtgttaagtaaataagaaaaagtcttgcattataaaattcaaatattctattacttgcaatttgaacccataattaattttaaaccatcaattttgtattattcaaaataaaagaaatgaaaaacaaaattttctcctagacaaaccgctggccactccaccaaattcatatcaaggtccccacttttccaacttgaaccatagactactccatgaagtccatgtcaaggtcctccattttttcatcttgaaccttacgacactccacatagtccagccatattaaggtccctgacttcttcaacttgatacatatcccataggtcactccaccaatttcatgtgaatgtccccccacttgttcttcaacttgaaccatagggcactatattaccttcatatcaagttccttataattgacaacaaatgtttagaattaagtaagcaaggaaaaaaattataaatgatgaatacatcaattataggaaaggatctaatttaaagactatttcgattaaaaaatctatataaaaaaagactatttcgtttcaatctagctattaattttgattcattttttaatttacaagataatattcttcttatacgtgaaaaaagactaattttcattgtcatcaattgaaaagattgttgtgtcatctatttctaattgtattttaacctgaatattattatttttatattaaaaattaattagtgagatacaaagaagtctaaaatgcttgtttaacttggtctatcgtaattattgagatcatagtttttccttttatatgtcttggtccaaatttctccatgtagatcatatttaacttaaaatgtaaattagaggatatgatctactaagaagtgtggcatgttttataaattatttttctatggtcctagctattctattgttagaccacaggtcttcatatattaaagtggttgcctgaatttcttttacttgtgtggtgatatttaaagaatagtgatagaagagaaaaataaatttacaatttattgaaatatccaacttatgaagatttgcattcttcatgcatatgtatttcagttttcattatcattatttggaaaggttgtttgtgttaattgtctatttctaattaatttgaaaatgaatattaattttttttatcataaaaattagtatcatattttttattttctttacaagttatcagcttaaataataggagcaacataatttaatttctattttactttttaaataattttaagtgctaaatttaagcaataataaaaatactcaccttcgatcaatataatattctaaagaaataattcatacaataacttaaataatctacaaagaaatataatttgttcttgtgccaaatactaaaaaaaacattttattttcttagtttaacgtgtagaattgcttaaattaatgaaaattttattttaagtaaatatttttataaaaaaaacattaatagtttacaataaaggtaataaaatttggtttaataatgagttttcaaattttaacaattatttaaatcaatcctttcttacacctgtgttaaggaaacaacaaaaagtcttacattattaaattcaagtcttctattgcatgcaatttgaaactacaattaattttaaattatcaaatttttattattaaaaataaaagaaaaaaaattgtcttctagacaaaccgtagacaactccaccaaatccatatcaaggcccccactttttcaacttgaaccataggccactccatcaaatccacgtcaaagttttttatgaccgataacaaatgttgggagttatgtcaaacataaaaaaatagactaaaatatatcattttcattcctataaaattttaatatgttattttgtatcgtaagttaagtttggatactgataattatcatgtattcttaaatgttggtgttattttaagacatttatgtgatgtgtatctcttatatttttttattgccatgaactaatcttctcttagagtttaatatatttggttcttctttcatgtaatgactacttttttattcaataaaatattgcaattgtttctcttttatgcctaacatgtgtttttgacttgatcacctgtttgcataatttttttattcaattataatagaaaaattcctttgagctgcgaattggagtgtctaaggatagttgagcatcaataaatactttatcttaatgcaaaacttttggttatgctaatccaagggatagatagtttaatggatttagtgttcttcacttaaggataatataacatctattaaatataattgtgtagtgattacttgataggaactccaataaaattaaacctggacaattttttgattgatttaatctcaatttactttgcatacacgagtgtttgttaaaattccctaacaaaagtttctccttaattttttcttttatttcctttcttaattttcttatttttatttctttccttaattcatttagctttatgcatattgttatttatattgaattagctaatcttaattaattccaaatattcagtgtagaaatttctttatctttattcatagggtagaaatattggtagtagaacccaactgtgatttcaaccgcaacctcgtcataaaatccaacaaatgtgatctcctctgccaccgtcgtggcaaaatccaatgagccccaactcctggcaaacctcatcatgaaatcccacatcaaatccaactgcgaatccagtcgtgtgaaacctactgaagtccaccaaacagtttttcttttctccatgttgtggtttgatgttttgttattaagattttgatggttcatatctattcttttatccagcttgttttcatttagtccacccaccaggggaaaaaatgagtggtgagatataatgaagatgaagagtgatggagacagataggagaaagaagaaaggggcaatacgacatcatttttatttttttaaaaaacttttttccatgtataatttccaatcagacaaagagtacacgtaatatcacacgtggcatgcatcatggccgattagcgatcatgtaggtagataataattttggactaacagaaaatatccgagaaaaaaaatttacgacttcaaagttgtaaggtatttttattacgatttcaaagtcatttgtttttattttctatttttctttttacgattttgtagtcattttggttttctttttacttttaaatttttttattttcttgtattatattttttattttttaaatttttttaataattttatttatttaattattaaacaaatattttatttattcattttaaaaaattaaaattcaataaaattattaaaatattatctaaattttaaatatacaaaatatattaaataaaaaatattaaaatggaaaactttgatagtattagttttatttaatttattgtatattttttatgggtttatttaatatgttatatattttttaatgtttttttatttaaaatatattatgttttctaatattgttttatttaattatttcttatatttaaaattgatataatttttaaataatgatatagaattttattttttaaatgaataaataaatatttatttaataattaaataaataaaattatttataatttttggaaaaattaaaaacaaaaaaaatgaaaatacaaataaataaataaaaatctaaaattaaaaactttaaaggtaaaaagaaaacaaacacaacttcgaagtcattcgtaagtttactgtttaaatacatgtaaatgaatgtaaatatatttaaatattaaatattttattttaagttataaatttttataattaaaaaaaattaataaattttgactaagaatacttataaaatagtatttataaaatcaattaaataaaataaatgtcttagtggtcaaagatcaatgatggaaagacaaagattatttattaaaaaaaacaaaaaaaacttaatgctttgatttaaaaataggcggaaaaaaatcagaaagttaaaattataagaaaacaaaaatgataatttaagcttattactactaattaattaacgatgcactaagaccaagctccaacatccgaatgcatgtatgaatctaagaatcagtatacgaaagccaggactacaaattgttaaaaaaagagagagagagagagaggctaaagatctgcctcttgtcttccataataaaaaagaaaatgtagcagaaggtaacgactgttcctcatgtcatttgtgttttttcaaatacaaaaaaagaagataccctgagaaaacttgatccttctcagtcaccttttttctacaacattaatcaattggagcaacaagctgatttcttctccacactacagacccactcacctcagggattaggtttagccgcgacagcattagtgcactgcagttagttaggggacagagatagtgcttttcccaaattctgttatcctcaaattctgttattatctgctagaaaacaataagcagtgtaagcctataaatatcaagagaaaaggaatgaaaaagcacagaacagaatttgaatgtacttttaagttgtgtattaataaaagattaaaagttaaaaaagtgtataatgttatatacaatattgctactggccattgtgttgcttgaatttgcctgttatttctagtttctgcacaccatgtgcttaagccaattttatataatgaaacttttgcttataagaaatattacatacaaaattaattttttcatatccaaataataaaactactttcaataagtgtaatcaaacaaagctaataagaagtgtgatacctgggcaaataaacgagcattccaatcttgattttcataaacattgcatttcatgagatcttgtctggtttcagcaacagctggattacctttccagtaagcataaggctctctgttcagccatggtatcctcgtagtgtcttctttcaaccctcccaacaaaatatgccatggctttatattaatctctgccctgtgcaccacacatacaatacttttcaacaacaacaaccacccaattatgaagcaagtgtagagtctaaatccatgggcattataagaatgattagggacttgtgttaactaccccaattaggacaatattctaactatggtggttgtgaatattttttataggacaaagaaattaatggtgctgatggcgtcaacaaattccaatcaggggaagaagaggaagataaggaacagtgcagtccagtatctgttttagacccacccttcgatgacgatgatgatgggcatgatgatgaccatgaaggggatggttttgatttggactatagctatgccaatgtacaaagtatgtcattgtttaaaaatattttattttattttgtagcattttatgttgtgtggtcgtcttccatcaacatgccatcgtacacgcttcttcaaagttgattgtctgttacaaaataccataagctgagatgttttgtgctaatgccacctatctttggtgggttccattggaagattgcaatagctcatcatccaacatgcatttcgcattcaatgtgaaattggactactctttgttcagagctataaatttcaacatgacccacaaattatgttcattctcattcttggcgctgttagtctagtgtgaaaaccgacaaattcagtttcctgttatatatggcactgtatataaaaaggaaacaaaaaaaagtagaatttgattatggctaatttcacccattatatttattacaagaaaacctttagattcaaattattttttttgtacttttagcttggtcgtaaacattaacgttacatcacgcacacacacataaaaggcaaatctaattggagagattcccaatctgaggaggaatcttcccactgaatccagtgtaagagaggtcgagatgagtcaaggaggaggtcattgcacaaaggaaagaaggaattgacataccttctccaactaaataattgaagctcaagtcaagatatcgaagcttagagagattgccaatctgagatggaatcttcccatggaatccagtataagagaggttgaggtgagtcaaggaagtcattgtcccaaggaaagaaggaattgacgtaccttctccaagtaaataattgccgctcaagtccaagtaattcaaatgctttaaatcagccaaacaaggacttatctctccaccaaagctccatctccgataagcttcaaatgcttcccaatcatcgaaagcaggaggtgaagtgttgaggtgaagctgaagaagatgggaagtgacgttgtggcagaggactccataccagtggcaacagttggtatgattatgattccaagaccaaagcctatttgaaggatcattcagattattcttaaacttcaaaagtgtctcacgctcacttgggatgcacacactctctctgcatgggaagctgaacaaccaaagctggacaaagacaagaatataaatggaggaggaattcatgatcatgcaacgcaaatatagaaaaaaggtgttttttttttagagctgatcgacacaagtgtagttgttggttctgcatataaatcatcaaacttctattatttatactgctgccctgcctgtttttttcttcactttcattactttttaccttttttattattgtgccaaatactaaaatattcttccattctttttttacgctggcctctttaaattatggatttaattatccaattctcccgaattaattcttagaatacgaaaaaaaaatcagtatcatattttatattttttacaagttatcaacttaaataagaggagaaacatattttatattttttacaagttatcaacttaaatgtttcttgtgccaaatactaaaacaagaaacatttttttattttagtttaccttatagaattgcttaaatcaattaaatttttattttaagaaaatattaatgattttttaaaaaaactttaagtagtttacatcaaaggtaattaaatttggcttaattagtcttcaaattttaactattattcaaatcaatccttttgttaaacctgtacgtgttaagtaaacaactaaaagtcttgccttataaaattcaaacattctattacatgcggtttaaacccataattaattttaaactatcaaattttaattattcaaaataaaagaaatgaaaacaaaattgtctcctagagaaaccgctggccactccaccaaatccatttcaaggtccccacttttccaacttgaaccatagactactccatcaagtccatgtgaaggtcctccattttttcatttggaaccttaggacactccacaaagtccacccatattaaggtctctaccttcttcaacttctgcaacgcatatatagaaaacaacttaattgtataagtgcttcttgcttctgcatataaatcataaaacttctattatttatactgctgcaagtgtctttcttttcttttttcttttttttatgatgtttcctttttttaattattgactttattatccaattctccggagttaattcttagaataggaaataattttgaatttactttatctatctccctttttaaaattcctatatacacaattttgtattgaaattaactattatttaatcaatcctttcgttatacttttgttaattaaacaataaaagtccaacattttattaaaaaaattcaagtcttctatttcatggactctatcaagtcttttattaaaagtccaacttttgttaattcaagtcttttacaaaattttgttaattcaactcttgttaattattacaaaatttggtattgaatttaactattacttaattcaagtcttttattaaaagtccaacttttgttaatttaactattattttgttaattaaaccatagccgattccatcaagtccatgtcaaggtcctctattttttcatcttgaacctttggacactgcacaaaatccagccatgttatgatctctggcttcaacttgaaccatagcctgggccacaaacaatatattaatgataaatacatcaattatagaaaaatggtctaatttaaagactatttcagttaaaaaaatttatataaaaagagattatttcgttcatatcttgctatttaattttgatcaattttttaattcacaaaataatattttctttatatatgaaaaaaaactagatttaatcgtcattaattggaatggttgttgtgtgatctatttctaattgtattcgaacatgaatattattttctttatcatataaaaattaattagtgatataaaaagaagtgtgaaaaagaatattaacttttttttctaaaaaaaattagtagcatattttgtatttttttacatgtcatcaacttaaataataggagaaacataattttaattgccaaatttaagcaatcataaaattactcatgttcaatataataatctaaaaaaaatatatacatacgataacttaaataatctactaagaaatatgatttattcttgtgcagatcgaatactaaaataagaaaaaaaatattttagatcacaatatagaattgcttaaatcaatgaaattttattttaagaaaatattaatcatttttttaatactttaaatcaaaggtaattaaatttagtttaattaatcttcaaattttaactattatttaaatcaatcctttcgttacacctttgttttgttaagtaaatgatagcatagcaagcaaggaggtgcaagcagtaacactcacacaaataaagatctttaagccatcatttttttttccttttcttttctatgaactgtcatttcttatctctacatggaatgcctagaagttgaaaactggagctttctttaactatactgctttccattttggcgaactgcttttctttctcataatgaactttccacttccaatgatggttcaacattaatcattctttatctattttgtctaaaaatttccactcactttttgtgagtggtgtgaatgtcatgcagacaaatgatgtccaagctccactttttccattcattgcaagttgtaagcagaatgtagaatgtacatataataaaataatgagaatggcaactactagtacgtagtacttaattagaacaaaagtatcaaaattaaaacgaaaataactttgatgctgttaatacatgagtttaattttgatacacagtgtaaaaatttaaattgttaattaattagaaatcacctaatgatttgtaaaacaattactaaaaaaagttataggagaatatatataattaattgcaattctaagtgtatttaaattaaattcttaattagcatatcctcactgtgattttttgtatattttttatttattgagacagtggaatgagaccgcactataattttcatcacgggtgtggttgtcaaatataatagggatggttgggatgatgttgcaggtgccggtttgttgttgagggaaaatgtactttttgaagaaaataaaattatgttttcaatgatatatattcgactttttgtatttgaactttgacaatttttttcttaaaatctctaatatttaaaaaattattttaaattatcatcgtttgttaaataatgacgtatccgttaaatattcgataacacaaaattgatttatagtacgtcaaaaactgtcaatattcatttgaaacttagtcttccacccgtctcaagctctccacatgaacactaagctctagataaaaataaataaataaccacgagaaataatatataactctttagtggacaattggtgttcttttgtgcattcagttgaaggaagttcccagaatggtagaaagcaagggacagatgaaacggccacagctaagaatagtgcatcttatatcgtgaagagattcttagaaagtttggttgcagttgcagggcttctaatttggctttcatgagcttaactcaaatattacctatatatattatcattttcatatcacgttgaaatgtaaaccattgataactgctaaataattctattttgataatagaaaataagtcaaaattatctttaaaaataattatttagcagttatttgcgcttaaatattaaaaaattgatgttttgttgaattttggttacagatataaaaactcgaagtgtaacaagcaaaaaagccagaaaaattgaagaaaagaagaaaatctgtagtagacccagcccaatacgtgcgcttagcacgcgtcacgcgctaagcggaccaggaagcacacgcgctaagcctgcaacgcgcgcgctaagatcgcgatccaacagaagcacgcgctaagcctgcaacgcgcgtgctaagcgcgcgatctataggcgctgagcgagggggtgttgcgctaagcgcgcctacgaaggcccaaaacccacctcaacagctataaatagagagtcagtaacccttagttagggtctaacaggcctaaaagtcaaagcgatgtatgatgtactcttcactatttatcaatgcaatatcaggtttttctttcctattatcttttctgtttttatcttgcatactcatatatatattctgttaggtcagaagattctaaataagatttaaagaagatatgcatacattagttttaaaggttagacgctcgagagaggataacttctaatagaagaaaaaatatcataataaaattattgttaggcatagagtgattgcattatgcccatgcgtcaaagcaaacatctagaattagaacttcatccattttatctgttgagtctttacaaagacatttgggagataggtaggtaaaataggcttgtaattgtgaggcatcaaggacaagtaaatgaatagatgtgggtaggataggatcacctgaattggtaaagaaaaatcataaacccatactatctaggtagactaggcaagtcagttcccaacattatcttatcttgaattcatcttttttttttttatctttaattattttatcttttcctttatctttaaatattttatcttttctttaccttatcttctatctttctttatcagttattttaaatttattatcttttgcttttaaattgaattttcattaatctaattacaaatgaagtccctgggattcgacactcgaattttcgagtactttactacttgtgacaacttggtgcacttgtcaacgaaacaacaaccatttatgagttgatagggtaaaaaatatttacagtcttgagtgtattaaatctctgacatactgacaattatgttcattctcattggagatttgttttatgtttttaatactaacctagagtctacagatcaaagttgctgaaaattatgttcattctcattcttggcgctgttagtctagtgtgaaaacggacaaattcagtttcctgttatatatggcactgtatataaaaaggaaataaaaaaaagtagaatttgattatggctaatttcacccattatatttattacaagaaaacctttagatagaaattattttttttgtacttttagcttggtcgtaaacattaaaattacatcacgcacacacacataaaaggcaaaccaaattattttatatccctaaattttatgagggaggatgctataaatactaacaatacatctctcacacaccaagacaactaaaattatatcacttaattgaggtggggatagttttgaaaaaaaaaatagtaggtgtggttgtgtaggtatgtttttttgttgagaaaatctttatataattatgagctatgataaaataaaaaatccatgatgagttccgtatttaaaaatcgttgtagaattatagggttgattaaaatgaaacgtattggtcattgagtgtatattaaaatgaaacgtacattacaagaaataaaacatttaaactttcattttaatatagaatttttctaaattgttatggtgcatgattaaactttaatcatggagtacacgtttttgccttatataagtaacatggtttaacatgatttgtttattatttatcttttcttctagttgtgttcattgttgtttgaaaattttatatttagtgaatcaaattcttttttaattcaaatagggacattagttttcgtatccgttaagaataattgataccaaatttaaataattgtattaaattctaattatcaaaaaaattccgtatttattatcataaaaatatttaacaatttaatcattaatttcgtatgataattgatacttgacaactaatatttattgcacttaatttcatttgataataactgatatttcttcaatcgcgtatcatttgtggcaaaacgaacatccaatatcattggagaacaatgttgatgtaacgattaattcattgagaatcacatgaatgcattaaattcaggatattaaatttacaaataattttatgtttttcaattatattttaacaataattaagagataaatctaagtcttctacatttacatttgtttataggtatttgggatattggagatgctatatgcgaatctaaattttgcttaacacaaatgtggtatgcaaggaaaaatcacattgaaatatttttatctgccacttctaattttaaaagatttgtttcaaaataaggatatgaagaacaaattattgattttagagaacatttcctccatgatgtttccctttcctttaggtgaaaaacaaatagacatttccaaaaataatgaaagtgcatcttatataatgttgtttatatagagaagtctttgaaaatataagttaagtactattactacaaactattctgtatcatatatctcttatatattttgatataaaacatttattaattttttatttatttcttagtaacatgtacatgaaagtcaaaccaaaccgaatcgaggatttatgtggcatttaacttttatcactttttgccctaaaagatcacactctaatcatgtatcaaaaatttgtggtgtacaagaaaactcttctatttgggaacagtcgatctttaattgaacctcttttggcaaatggaactagctttggattaccatgtgacaaaaaattactttgctaaccattattttattttaatttaccctatagaattgattaaatgaaaatttggtgtcattaaacttcaaattttaaccattatttaatcaatcctttcgttaaacttttgttacgtacaaaagtctaacatttaaaaaaaaatcaagtcttctatttcatcatatcccaacccataattaatattaaattatcaatttttcaatattccaactaaaaataatgcaaaagaaaattgtcttctaaaccatagctcacaccatcaagtccatctcaaggttttccattttttcatcttgaacctttggacactccacaaagtccagccatgtcatggtctgacttcttcaacttgaaccataggtaccataggtcactgcattaccttcatatcaagttccctgtcattgacaacaaatgttgcgagttaagtcaagcaaggaaaaaaaatataattgatgaatacatcaataattataggaaaagggtgtactttaaagactatttcggttaaaaaatcaatataaaaaaagagtatttagttccaatccaacaatttaattttgatcaatttttcaattcacaaaataatattatcttatatatgaaaaaaaagactaaatttaattgtcatcaattgaaaaggttgtctgtgtcatctatttctaattgtattcaaacctaaatatgattttctttatcatataaaaattaattattgatataaaaagaagtggtgaaaaagaatttaacttttttctataaaaaatagtatcatattttgtattttttataagttgtcaacttaaataataggagaagcataatttttattttcattttacttttaaaataattgtaagtgccaaatttgaacaatcataaaaatactcacgttcaatataatattctaaaaaaatatttatacgataacttaaacaatcttctacaaagaaatatattttattcttgtttcaaatactaaaataagaaatattttattttaatttacagtataggatttcttaaatcaatgaaatttttattttaagaaaatattaataatgtttttaaaactctgagtagtttacagcaaaggtaattaaattcggcttaattagtcttaaaattttaactattatttaaatcaattaatcctttcgttaaacctgtacgtgttaagtaaataacaaaatgtcttgtcttataaaattcaaatattctattacttgcagtttgaacccataattaattttaaaatatcaaatttttattatttcaaataaaagaaatgaaaacaaaattgtctagtctcctagacaaaccacttcccactccaccaaattcatatcaaggaccccacttttcccacttgaaccatagactactccatcaagtccaagtcaatgtccttcattttttcatcatgaaccttaggacactccacaaagtccagccaaccatatttaggtctctatcttcttcaacatgagccataggtcactacattaccttcatatcaagttccttatcattgacaacaaatgtttagaattaagtaagcaaggaaaaaaattataaatgatgaatacatcaattataggaaaatgatctaatttaaagactatttcggttaaaaaatctatataaaaaaagactctttcgtttcaatctcgctatttaattttgatctattttttaatttacaaaataatattcttcttatatgtgagaaaagactaattttcattgtcattaatcggaaagattgttgtgtcgtctatttctaattgtattttagcctgaatattattttctttttcattaaaaattaattagtaagatacaaagaagtgtaaannnnnnnnnnnnnnnnnnnnnnnnnnnnnnnnnnnnnnnnnnnnnnnnnnnnnnnnnnnnnnnnnnnnnnnnnnnnnnnnnnnnnnnnnnnnnnnnnnnnaaattctccatatattgtagatcatatttagctaaaaagtaaatagaggatatgatataccaagaagtgtggcatgttttttaaattatttatctatggtcttagctattttattgttagaccacaagtcttcatatattaaagtctttgtctgaatttcatttacttgtgtggtgatattttaagaattgtgatagaagagaaaaataaatatataatatattgaaatatctaacttatgaagatttgcattcttaatgcataagcttttcagtttatatattatcattatttggaaatattttttgtgttaattgtctatttctaattaatttgaaaatgaatcttaattttttatcataaaaattactatcatattttttattttctttacaagttatcaacttaaatactaataggagcaacataattttaatttccattttactttttaaataattttaagtgccaaatttaagcaatcataaaaatactcacgttcaatataatattttttaaaaaataattcatgagataacttaaataatctacaaagaaatataatttattcttgtgccaaatattaaaataagaaacattttatttttttagtttaacgtataaaattgcttaaattaattaaaattttattataagtaaatattaatattttaaaaaaattattagtttacaataaaggtaattaaatttggcttaataattagtcttcaaattttaaccatttaaatcaattctttcgttacacctgtgttaaataaacaacaaaaaaagtcttgcattattaaattcaagtcttctattacatgcaatttgaacctataactaattttaaatgatcaaattttcattattcaaaataaatgaaaagaaaaaaaattgtcttcttgacaaaccacagacaactccaccaaatccatatcaaggtccccactttttcaacttgaaccataggccactccatcaaatctatgccaaagtttcttatcattgacaacaaatgttgagagttaagtcaagcatgaaaaaaatagggtaaaatatatcatttctatccctataaaattttgatgtgctactttttttatcctgagttaagtttggatgattgataattatcatgtattcttagattttggtgtgattttaggatatttatgtgatatatgtcttttatgcttttttattgtcatgaactaatcttctcttttgttggagttgaatataattggttcatctttcatgtaatgactatttttttattgaataaagcattctaattgtttctcttctatgtttaatatgtgtttttggcttaatcacctgtttgtatgattttttttattcaattgtaattaaaaaatttctttgaactacgaattgcaaaaaatacctaataatttttatgtctaggaataagataaaaagannnnnnnnnnnnnnnnnnnnnnnnnnnnnnnnnnnnnnnnnnnnnnnnnnnnnnnnnnnnnnnnnnnnnnnnnnnnnnnnnnnnnnnnnnnnnnnnnnnnnnnnnnnnnnnnnnnnnnnnnnnnnnnnnnnnnnnnnnnnnnnnnnnnnnnnnnnnnnnnnnnnnnnnnnnnnnnnnnnnnnnnnnnnnnnnnnnnnnnnnnnnnnnnnnnnnnnnnnnnnnnnnnnnnnnnnnnnnnnnnnnnnnnnnnnnnnnntcccaaacaataaagcattctaattgtttctcttctatgtttaatatgtatttttggtttaatctatgatttttttattcaattgtaattaaaaaatttctttgaactacgaattgcaaaaaacacctaaatttttttatgtctaggaataagataaaaagaattgagcatcaataaacactttatcataatgaaaatcatttagttatattaatttaagggattgatagtgtaatcaagggatttaggtctcttcactaggaattaaagtgaaaataatatgatgggtttatgataatataacctttattaaatatgaatgtgtagttattaggtgatagaaacttcaatgaaactaaaccccaacaattttttcattgatttaaccccaacaattacatggggtgtttgttaagtcattgttagtgcacagttagtagaagacaataatgcgtcataaatacaaaacagaatttgatgctcaagtctgaagctcgtctagttctcttaacattaagaacatttattaccaatgaaagcaaaacaaacagactccccatatgaacatgtacatagtatggtaaaccttttcacatttttaatgtctagaataacacgttgtaatgtctctcactcctaacagttaacatgtaaactcacaatttcccaagtaaccttcttaccttcaaaactattatcacataaatcagatctctcaagtggtcaagataatgaaaataagcacgcctccaagttctgttgaagaaaacaacactgcaaaaaccccaaaatcctgctgcaaatccaactcccataccaatataaaactctgatgttccaaagaaattaccatcaccgtgtccaacagaagctctctctgtcaactcttccttgtctgtgcaattttttgttacaggaggaccacaaagctcaggatttccagtgtagctaagttcttcaaagctctgaagttgggtgctcgtgggaattctgcctgataagttgttgtatgatagattcaggacactgaggaaggacaaatcagataagctttgagggatttgacctgaaatgttgtttagtgagagatcaagggattctaacaannnnnnnnnnnnnnnnnnnnnnnnnnnnnnnnnnnnnnnnnnnnnnnnnnnnnnnnnnnnnnnnnnnnnnnnnnnnnnnnnnnnnnnnnnnnnnnnnnnnctccagacagatgatttctagacaagtccaaaaaccgcaaagcagatagcttggaaatttcagatggaattgctccagacagcttattacttgaaagatcaaccattctcaccaatatcagattgtctctgtactctaactcatctcctttgggaactaagacaagagtttccttgtagtggttataactgaagtcagagccatatgaataacttaaagggttggcaaagaagtcatcttcaccagccattgtcttcatgtcattcaaacaatttggaatggatcctgacaggctgttattgccaagatccagcactataagggaagttgacaaatcttttcagtaatgctgccattgaaattgttggatcttagacgaagaaccattagatattgcatttcccacatccaatctggtattgcgtcagaaagttggttattgcccatgtcaatgaatttcattgtagagcaattttgcagtgttgaaggaatatatccagagaagcggttgtcgtctaacaacaaagactcaagttgagacagataccccatggagtttggaataacaccagacaaattgttactacccaagttcaaatgcaccaatgcttgccaatgcacccaacagtgaccaagatcaccatataagacattatttgaaaaatcaagcacacttaacttattagtagcattttcctttccacataaaaagggagaaattgttccggaaattgagttattggcaacattcagcacttcaacatttgaagacacacttggcaatgtacccttgaacaaattagaactcaaatttatgaggctggaattgagaaagatgttagataggtctccacttaacagattgttggacagatccaggaattcagtttgcaaagtccaattccaaaaccaacttggaaccaagtctgcaatacctgccttagacattgtcaaaaccttcacagaactttgcctttttagccattctggaaacttaggacctattccaaaggagctcagtaaaacatattcaagctgaaaaggaggaacccatcctgagttgacactgaggaacaagtttgtccaagacaaacgtagttcctttaatttcaaaagttttacaaaatttgactcttttatagatccttctaacaaattagatgaaaggtctaacatcactaaatttgagagagttccaagagttacaggcatatcaccagtcaaagaattagttccaagatttaatacctgcaggtttctgaggaactcaaaactcttaggaatggttccattcagtcggttgtgagccaggtttaaagttctcaaggatgacaagtttgcaaatggtgagggaattggacaagtaaaggtattattactgagatttagaacttcaagatgcttaagctggccaaatgaatctggaagtggcccactgagctggttgttctgcaggtctagattttttatgttctgaaggcttgatattatttgtggaatttgtccctgtaaaaggttactgtgtaaatcaagttggacaagagttgtgctgacattaaatagccatgaagggatttgctgattgagattgttaattgaaagatcaaggacttggagatgtgtgaagttggtttttccttttggtggtcctaagttatcaatttgacagctctccaagtgtagttctgaaagagatggaagtgcactcagtacttgaagccagttaccttgtttatgaaggtctgaaccactcaaatcaaggtactctaaggaagatagccttgatatccaattaaggttatctatctgaagagcataattgtatccaagattaaggtgctgcaggtttgagaggtttcctagttgatgagggattaatcccatgaacccacttaagctaaggtccaagtatctcagactctccaatgagcctaggaagcttggtattggtgtaagaacaaaataatttgaactcaagtccaaacgattcaaatattttagttcaagcaaagaaggactaatctctccactcaaccccctatagggagagcccgcaggtgtgtcaagattgatttccatgactttacctgtgttgttgcagtgaacccctggccatgtacagcaatccgatttgtcagaccacgatgaaagcctgtttgaagggtctgctagtccatgcttgaagctgaggagtgcattcctttccttctcgctgcaagtcatattgagccttgctgccttgcttgcactgaagtggagagttgttgcagtggacaatatcaagagaagaacatgagttgcaaatagcactgccatgaagaagaaggaagaaggaagacgaaaaaggttgaatccacaattttctggttcacggttggtatttactactaacaatgcctatataggatatataccatagaagggtttgcatttaaaattttattccactaatggtggtggttgcaaaatgcacacatatgtagaggtatatatgtctacaaggagacatttaggattaaaagtgcctaaccacaccaccattattttgctctagtttattttattttgatttaattatccttttagtccttatagttgtgataatttgttttagtccctatagtttaagacattcattttggttcttatatttccaattttttttgtcagaccacgatgaaagcctgtttgaagggtctgctagtccatgcttgaagctgaggagtgcattcctttccttctcgctgcaagtcatattgagccttgctgccttgcttgcactgaagtggagagttgttgcagtggacaatatcaagagaagaacatgagttgcatatagcactgccatgaagaagaaggaaaacgaaaaaggttgaatccacaccaccattattttgctctagtttattttattttgatttaattacacttttagtccttatagttgtgataattttttttagtccctatagtttaagacattcattttggttcttatatttacaatttttttttatcttttggtcctcgcggggaagattcaactcacacataaacatgaacaaaattaataaaaatagggaagcaagctcaggtacaaatgaagtgtaatggaggtatgagacaaagccactacacattccattattcttgagtctgccaccgacctctgcaagcttagcatttgccaattgccatgatgtaatctcgttcttgacagtctctcatcaagttggagtggtatcacagcattgaactaagttgatcgttccaatgggatgatggttttgattgctgcagataaagtgtgtgattgtgagtttctggtcccatgagttaaactataaggattaaaaaaaatattgtcataactttaagggccaaaaggataattaaaccttttattttttttttattctaaacaatggaatacgtgtgaaatctttgaattctatgtaagaaatgttatttcaaacttctcatcagtcttcatgccaatgatgacatgctccatttgaattctatgtctaattaagctctcggtcttccgtttttgcaactttatttcgtagaaagcagccaaatttgaagatacaacatttgatactataactgtttggtgttttgaaaatctcactcacatatttccaaatgttacaaaagaatttgattaagtggtttttacgaattccttcctagccttttttaccaagtcagggaatttgcattgttgtgcatgatggctgccacaaggaccattgtaccaacccattagtgcaagtggttttttcttatgagaattgagaaacaaattatatatgtgttttataaagggaattctattatttttaattttgaacttgtaatgtttttggtttccctcacagaacaagtgatgtgattcttgatcgacgccatacgtacgcctactttgatgctcttttttcacaccacttttatcttaatggtatctcaagttgacaatcataaattaaaatagctaactatagttgattagtagagacaaacagctcaaagataaagatctttaatccatcattttttttttccttttcttttctatgaactgtcatttcttatctctacatggaatgtctagaagttgaaaattacttgagctttctttacctactgctttccattttggcgaactgcttttctttctcataatgaactttccacttccaatgatggttgaacattaataattcttcatctattttgtctaaaaatttccactcactttttgtgagtggtgtgaatgtcatgcagacaaatgatgtccaagctccactttttccattcattgcaagttgtaagcagaatgtagaatgtacgtataataaaataatgagaatggcaactgctagtactacttaattagaacaaaagtatcaaaattaaaacgaaaataactttgatgctgttaatatatgagtttaattttgatagatagtgtaaaaatttaaattgttaattaattagaaatcaccaaatgatttataaaacaattagtaaaaaagttataggaaatatatgtcattagagttaaattgcttttggggaagaaccaatgtcttgaaattccctcttcaccagaagcagttttattgtgtctttatcgaagtcatcttctccagagacttgcctttaactttgaagataggaaatagatcagtcaaacattgtttcagtttatttggattttttttgaaggacatgtgattttcaaagacttgttacaactcacaacctttggaatttctctatgcctggttaacccacaatttctggcgcctgttgcggttaggaacataggctagcaaaaacactaatcatttcaagagaaatgttaacacacttttctaatatattattttttattttaaaatttattaaaataaaaaattcagctgatctcatattttatttagcaaatttttctcatatattaagtcttaggtttttgaaattataaagctaaaactaaaatgtttgactaaatgtattttaaagtaaattttatacacaaaaatattatgattttataaaaattgtttggtcaagggagacatattgagccctcctaactataagctaccctgagggtttctatctttttttttcccacttaattttttactttggcagcaagggttaaacctaccacatctatatgactatgtcttactttccaataagttacacctaaatagctaacatattcctcttgctcacgcacactatctttcgtaaacttttcacgatcatctttatattatcaaattcatttaattaatatacaattatcttaatattataagctataatcatgtagtgtttctaaattgaatgagcctaaatcacacactcctgaaaaaagagtcatattgtcaaaatagccgtaaaaagatagaaatactaagttatgggcaagattttgatatactataaccttaatttttacaataaacctaaatgtctaaatatcataactcaaccatgcgacgaaatgacaatgtgttaattttgtggtgtcctcaaccatgcgtatgcctcaggccgagggaattctcacacaccactcctaacaatttctaaggaattccacaacgtgtctatgcttcagacaacaataacgtacgaaataaacaagtagcatctaataatgttaaaataatgtctaggcttgaagactaacatgacaattgctgttggtctcccttctctttgcaaaacacctgataatctctcacagtgttctggtacgttcaatttctaattaagccttcctttttcttaaagaacactacactacagtgttatgtttccattttctatgcaatgaatgatctatcagtcttgttagttgtcatataacaacttatgtttttacattcagttgaaggaagttcccagaaggaacagatgaaacggcctcagctaagaatagtgaatcttatatcgggaagagattgttagaaagtttggttgcagttgcagggcttctaatttggctttcatgagcttaactcaaatactacctatatattaccattttcatatcatgttgaaatgtaaaccattgattagttgatagtgtaaaaaatatttacactcttgagtgtactaaatctctgacagactcacaatagatattattgcaaaaccttttggagatttattttttgtttttaataccaacctagagtctacagatcaaagttaattaattgctgaaaattatgttcattctcattcttggcgctgttagtccagtgtgaaaacggacaaattcagtttcatgttatatatggctctgtatatgaaaaggaaattaaagaaaaagtagaatttgattatggctaatttcacccattatatttattacaagaaaacctttagataaaaattattttttggtacttttagcttggtcgtaaacattaacattacatcacgcacacaaacataaaaggcaaaccaaattattttacatccctaaattttatgaggaaggatgctagaaatattaacaatacatctcacacacacaaagacaactaaaattatatcactaaattgaggtggggatagttttgaaaaaaaaaatagtaggtgtggttgtgtaggtgtgtttttatgtttttcaattcaggatattaaattgacaaataattttatgtttttcaattagattttaacaataattaagaaataaatctaaatcattctacatttgtttataggtacttggcatattggagatgctatatgggaatctaaattttgcttaacacaaatgtggtatatgcaaggaaaaatcaaattgaaaattttttaaccaccacttcaaattttaaaagatttgtttcaaaataaggatatgaagaacaaattgtttttacagaacattccctccatgatgttttcctttccgttaggtgaaaaaaatagacatttccaaaaataatggaagtgaaccttatataatgctgtttatatagagaagtctttcaaaatacaagttaaagtactattactacaaactattttgtatcatcactactacaaaagcagcttactacgtcagcaattcaacgacggtttcaaagaaacgtcgtagaagctcaaccggtggcatatccgtaattaagggcttcagaacgacgacgtttgccgctacccgtcgtagacatccagctgttgtggcgattcgtatttagctgggtaagttacaaagatggttttttggaaagaaccgtctttgtatcgtaaatggtagcacgtggcaagcatttgagtgggccgacgagtatacaaagacggttcactggcgagaccgtcgttgtttttaaagtactttcacgtggcagccacgtgatttgaggatttaaaatccaaagacggttttatccaaatacccgtctttggattgttggtagtttcacgtgtaggccacgtgattggaggcgttaaaatacaaagacggtttttggctaacacccgtctttgtatggttacagtataaacacgttatcaaagacggtcctaccgcaacacccgtcttcgtattgtttgtggtacacgtggattgcacgtgatttaatgcgttaacatacaaagacgggtttacccgaagagccgtcgttgtatgtttagtatagacacgtggcggccccctggtggttgttgttgttgtcattcaaagacggtctttggtaggacccgtcgttgtatcctaaattgtatcacgtttacgacacgtgcttcttactatctcatacgttggcgcgccgtatcacttcttttctccatttttttgactactcattattgctttggcgctctagctacacagagcatcttctccgacaaagaccatcgtctccgacaaccaccatctcgtgtccgttgcgtctcgttccgtttgaagccgtcgccgacaaaggtatgggtgcatttagctcttctttgtgtatcccttcatttgcatgtgttatattccttcattcatgttatgattctgcttcattgtcgtctcaggctcttggttgtagttggttgtcttcatcgtggtctacattgtactgtttaaggaagataagctggttccataaggtaagatacattgtgtgttttgtgagagaaagtacaatttttgtctaccttcttatgtaatctgcagctatgggttgtaaatttttatttttttttgcgtttcagtggggtttatgtggggctcgttgatgaagctgacttgcgggcagtgagtgaatgactttcgggaacagcctgctaccatccttcatcagtggtgtgtcatcctgtgccacattatcagtttcgttgagcgtttggtctaagttagtacactgaacttgatgaaacccatgatgtttaatttgagcttcagatttactgtcttcatgtttagttgtgtctgtaattgaataaactggagaataaattatatataagtatgttgtttgtaaaagttttatttgatgaattacataagtaaattgatttactttataattgccgttaagatgaaacattttggtagttgcagtagcttgtatgaaatgttatgagtactgatggaaagagttgaatctccctctgaaccccttttcaactcatcccctaactaactctctaattattcaactaactatgggggttacatattaatactggtgatttttgattctgatcctggaaaggtacttgagccacttctagaagtcctagaattaaaactgaacatcttaacttcatcaaaagaagggtaaccactgtatggtaaagcacattcagctctagaccacgtagtagctgatcttatttttccaagcaaactcatttccatgttatcttcatcagactcaatgctgtcaatttccacctccaaaattttcacaacctgcctcattgttggtctaatactagggtctgtatgtgaacacaacaaacccaaatgaagcaatctctcaccttcctctatggtgtatccccctttagccttcaacctttcatcaactgcactgtgcaattggccttgcaccattaaggacatcagccattcaattagccccggcttatgttcttcaataggtctttgtccgcaaattacttccaacaccaatattccaaaaccaaacacataagacaaagttcacgctgttcctctttgaatcacttcaggagcaatgtatcctagtgtccctattactcttgttgtgctgaccacttgtccctgatgatcatgcatacgagccaatccgaaatctcccagccttgcattcatgtccttatgaagaaggacattgtttgcttgaatgtccctatgcaagaccttaacttcccaaccctgatgcaggtatagaatccctgtggctacatttttcaaaacttgaatcctctcttcccatgttagcatcattccctcttcacactcaaatatccatttgtctaaacttccattgctcatgaagtcataaactagaatcaaatttcccttttcttttttgcaccagcctcttaatcctactaaatttctgtgcttcattctgccaaggcttgaaacctcggccaaaaactctctcatcccttcttccctttcttgaggaattctcttgattgcaacttctaccccatgcaaaacccctttatataccttcctggtccctcctacagcaaccacattctcttcaaaaaacaccgttgttgctgcatcgatctcatggaaacctatcctgtgaggccaatactccagttcccaatcttcaacttcttcttgtgtctttcttctacggagaacgaaaaatgcgacataaccaaaaccaatgattaacacaaacacaatactggtgacacctatcgcgaaagcttgtgctccaggaaaccactttttatgatgaacaaatgaaggcaaattttctgtcactaatgcatcaccaattgaaaaatttgaatcactaaaactccaaacaagaatcttagcactgtctattatcctccctgttgaataattatttgatatcagtagtgatgtttttgttcttcaactgggtgttgacatcagccacaaacagttgacctttcttttgagtattatttccttctgcacccctgtgtttgtgagttcaccctctgtcattgctgttatgtctctgctgccctccattgaagcttctctgttcataacaaggaggtacccccacctcctttgtttaaacctgcaggtgacctgaaattaccatcagggtggtggtcactttgttgttcctctaaattaccatatttaagtctatgatctattgggtttgtttgttcttgttgttgctacagggggacacatcaaccaagctgtgaccttcaacagatcttattacaaggtaatcacttcaatgaacaaatggttgagtcactagggatccttaattaagctctgtgtcttaatttaatgactttaaaatcagcagacattatatatcatgcatgtatccttctaagaagcatttttcatttgcttttaggattttcaaagtgcttatatcatctttttattccttaattatgtgctcttatgattaaatttgactaattaaatgtatatttctcccgattattatgatcaggttcaaattataggacaattgtgcacgtactataacctgaacagccatccacaaggcttaggttaaaaataaaaccgtggaaccatcacattattactgcacaatttgctgttaaaaaaaaaaacattccacgacggttctaaggaaacgaccgtcgtagaaacgtgatgtttctaagacggacctacaaagcaaaccgtagtagtattaatacaagtctacgacggtccatgccatacaaccgtcgtagaacacgtttatctcaacgacggtgttgttacgtgaccgtagtagtattaacactgtctcttacgacgatcgtccgcaacaaaacaccgttgtagtgatatgacccttatccccatgcccgtcgtagtctgttgttacttctacgacggggctgttgacagccgtgtttgaattgtggaccttactacgacggtcctttggaaacaaccgtcgtagaacaagattatgtctacgacggtgctgtccttatggtcgtcgtagtctctagtaagttctaaagacagggttgaccgacagcccgtcttagaaatctgtaatatctacgacggttttctataaccgtctttgaaagtcatcgaatttattacgtcgtcgcagacaacgacggtcttcaaccgacgtagtatacccatttaaatcgacgttgaattctgcttttgtagtagtgcatatatctcttatatattttgatataaaacatttaataattttttttatttcttagtatcatgtacatgaaagtcaatccaaaccgaatcgaggatttatgtggcatttaacttttatcactttctgccctcaaagatcacactctaatcatgtaccaacattttgtggtgtacaagaaaactcttctatttgagagcagacgatttttatttgaacctcttttggcaaatggaactagctttggattaccatgtgacaaaaaactacttcggattaccatgtgacgatttttatttgagagcaggcgatttttatttgaacctcttcactgtttttcatcaatattaccaaaatttccttaaagtgttcaatatttcgtaatcttcataattaattcaaaattctcaaaagattagtatatgaccttttttcttgtttgtactaggagaggaataaatgaaaaaaattcagaaatttgtggattgcaatttgctcaaatgatgtgtctattagttctttgaaatttgtatatattgatcatatttatttttaccttttaatagatatattgtgctgtcatcccaagagaaggatcaaacattgatgatgcagaggtgctaagatattgcaagaagaatcttgcatctttcaaagtccctgaaaaggtcttcattactgattctttgcccaagactgccaccggaaagattttgcgtcgtcttgtggcagaacacatttctcaaatttgagcaactgatcaagtcctacttttgaagcctccatacctggccatacatagttggagtccacacaccataaatttcaacaataatttggcaacttggcatttaagaggagggtaattctgcaaatggtctttcattcaggatacaatagattgtagttttcaatgattcacgtgaaatgttcacaatgcaatgttttcaatgttttataggtcttaaataccaatagcagacaagatcatgcttatgcttttttgctatcgtgctcctgttccttgccactggtcttgatgaagccaagcattgtctctttgccttttaagttgtacatagttgcaaaacgggtacatgtgaaagaataatgcttattaatggcaaggttgattttaaagtgggcatgcaagaatgcattcattatctcaagtaaataaattcaagcgaatatgtgatttggattagagaatagtattatccagtgcacactaaattggagagattcccaacatgtggtttcaaaactaaaagtacttaccaactatttgaattttaatctacgtgatctagctaatgttttctatcagagaattacaactagttgatcttaagtacaaaactatactaaatatgcaaatctttacatctaaaaacagaatttaaataaggctctcaaatttgaagaaaaaaacgaagatagcaatgactacaaattgatcaatctgccaatacaatgataaaacatcggtttattctaagcaacactaaaaagtgatactacatgagcaaaaagattgaaattattgaccatgcagtatgaatgtacagcattatttatttaatttttctactacaattttattttatattaatacactatatcattatgacatcaacccccagcatgagtggcccagtggacaagcccatcaatctaacatgtcggttgatagcacttgcataaacttttgttccttgcatcatcccatgtgtctccattctccattctctgcttccactaacgattaaaccttattgattagggttcaatgatttttcaatgaataaaattaatttttaattcttgattctaacagctcacgtatagtctgttgaatcaaatggattagaatcttgatatcataaagaaaattaaaatttgattctttgtgtaaaataaagaaatctaattaattatgcttgttatgttactatatatatcatttttccggtgtggagtaatatcaaaatcaaagtaacaaagttacttgcatgttactctaaccataattctagctaagtcgaatatgatttgatgttttgtaaaacaatttagatcccctttatcaaagtgtatctgtcttttacacaagttttttcactttattttatttcccccagaatcaaatgttgtgttattcatactattaaattagtctgataactaccatgtcgatcattgttagttttgtttccaccattgttcggagtacgtatatactattactttatgattaaacgtgttacttaaattgcagataaaaactctttataatgaagtacaattgtttataactacaacaattatatcgagtcaatttaacactcatcaaaggcagaaaagctttactttaagattagacagaggctcataccaatcatggcggtggttataattacacacatcagcaactgtaaaagatcttgcacagccacagaaaaaaaaatgcttgatgcacatctgataaactcactcaaggtctatgtattaattgtgtaaaagagagactgaatattaaatgataaaaatataaaataattgttttgtattggcagagtacacatatatatgcccaaatgtagattcaaagttcaaacattttgggcctatagctagaccatccctcctagtcatagccatctgaattggatcgaccccaccccaaggtttgtgttgcatcacttgcatgcattcacccaccacagttgttgttatagttttctcgtgaattttgtattggaaaatactatggacaaatataattgatacagtcataattaattattgtcatgttgcaattacaaagactcctcaaagaaaatgtttagtaaatcatgatcaagtagaaattgcaatggcaaactgttttttaaaatcttattagtcagttgtataaacccaaatttagttatatccaggtatgtaatatttgccattttagtgctctgtttggaaatttgcatgtcgaattgtttttttttatacgtacctacacaacactctttagccaaataccactgttcatggaggaatctgtcctgaaaggagtatagaaccagaaacaatatgcgtggtggtatctatcattctgaaaaagagaaaaagcgggatacgtacaataggaggactgtgatactaggggtggaaatgagctgagcagcttgttgagggcctttggctcggcttatgtgaggctcggctcggctcggctttattactataaaggtcaagctcaagcttttaaaaaaacctttttagattaaaaggccaagtccaaactataaaaaagtttgacaagccggcttgtttaactaataataataataataataataataataataactttattttatcaaatcttatcttatccagattttattccatctagattttattttctccagattttatttcatccaatcttatcttaacttgtcctgattttattttatttcgtttatgggcttggacttaaaatagatttgtgagcattggggctgaggacctatataacagcaccaaggttttagtttagggagtttttttcggataggagaataattctaggattttagaattccagtttttattactgttcatgcacactgttcacgtagaataaaattcgttttctgcaatttcgtttcgacttcaatctacagtttcatttctactgattaatggaaggcctagtctcnnnnnnnnnnnnnnnnnnnnnnnnnnnnnnnnnnnnnnnnnnnnnnnnnnnnnnnnnnnnnnnnnnnnnnnnnnnnnnnnnnnnnnnnnnnnnnnnnnnntgaatactaatcagttttctcttcacccatactttgtatttgtgctattaattcatgcatgcttagtgcttgattaattgtctctgcgcttaatttacgttcatgcttaatgatcagtttcgttcatgattaattggtgtatgtgttgtttaatcacataatgacagccttatgttaattttcgcttagtaatttaatttagggttgaattaagtggttgaactgattaaagataaattctcgtaacctaggataaaagacttgtttgtgaatcaaggggaaacatgttttaattatgttattttctaattaaaatttgtttgttgtttaatttacaaaaacaaacaacccctcaattcattattgttttattattatctgttatgaacgattggttaaccattgctcgttgggagacgacctaggatcacttcctagatattacatttttaatgtttatttaattcgggtacggcctcgatcaatagtgtataagatatgacttgagtagactaagatgaaattattgtagatatatttttttaaaaaaatatttaatataattatatgttcaaaaattggattaaaaattgttaatttaactaataataatttttgtttgactatattagtgtaaatcatctctaatccatacatttttttaatattatgctctttttattatctttttatatacttggtgctttaacgacttgaattcaatatgattttgtttatcaattatttttggatttgtacattacttatacgaaattttataagttttttttagttagtatttcactaggttttaaaataattaattaatcaaagacgtctttaagcaaacttttaaataggctcgtgggccaagtcagacttttatgtaagccgaatcgagcctaaaaaaaagtctatgacaagtaatgagccgagttcaagccttacgtattcaattcaagccgaactcaagcctaataaaacttggcttggcttggctcatttccacccctatgtgacactactagaaaaatctatgcacctttcatgtccctaaatttatgaacaaaagattcaggtgtcgtttattgaatttgttttatatggagtgtaaagtcatatccaatactaataagtgtatatttatataattcttttttaaaataattactcttctttatttacatctaataaaaatgttaatattataggcatacatctaataagtgtatgttgttcaaataacagtattaattatattaaaatagttaatattaaaaaatatattaaatataacattgttgtgttggtgctatttattgtgcatcaaaatatgtaaaaataataattaacttgtaatttgtatagttggtatgggttgttttatctatcctggattttgttgtatcaaacatataatcatttatatatatatatgggctactattgtcactaccaaaaatgctattgagactaccaaagcttttgaaattacttggttatccttagttccatttccccacacctcctatccttcccctctttacgttcagctactctccctctttacatccaaaaacagaatttaaataaggctctcaaatttgaaaaaaaagaagaagatagcaatgactacaaattgatcaagctgccaatacaatgataaaacttcggagtattctaagcaacactagacagtgatactacctaagcgaaaagattgaagtttgaaccacacatgatcaaggaaatgaaaataggcataccgccatgatctacaaatcagcaaaggagcaatcactatccagaatcccacaataaatccaattgtcatactgacaaaaaaccaattcactccatgcccatcacttccttcataactatgggttttcccattggagctgcagtttatgggcagtggtggaccacatagattgttgccgatgaagctggaggcatcaaaggtttccaattgagttcctgttggaatatttcccttcaaatgattgtaagacaagtctagcatgctcagaaagctcaaatttgcaatgcttggagggatttcaccagaaagttgattcctcgaaaaatcaatggactgtaatgatctcatattacctatacctcgtggaatatgaccaatcaattggttgtgggacaagtttaaaaaattcaatccatttagatatgtgatttctcttggtatctcccctaataacttgttacttgacagatcaatgcttgttaccaaacccagaatgtttctgtactcatctcctcttccttttagccatagtagcacactaactatactaactctggaagagtaatatgggctcaaaagagctacagaagagatacgaggatctgtactttggttcattagtgtcatggaactcaagttactgaaacagctcggtatattgccagatagattgttttgtgcaaggtctaaaacctgaagaagactcatctgacatatttcctttggaatgtggccggcaaaactgtttgatcgaaggcggaggattttcacatttaagaggttttctccaacccatgttggaatagttcctgaaagattattttccccaaggtccaaggatatcaattggttattcttcttcaaactggttggaaatattcctgagagtgtgttgttactaatttgtaaagactgcaggtctgccaaggaacccatggattggggtaagttcccaacaaaatggttgctttgtaaatttacatccccaagagatgtccaattcatccagcaatcaggtatctctcctgacaaattatttgatgcaagattcagaagttctaattgcattggctcatcctgatcgttacataaaaagtcattcatggattcagagaatgaattgctcgaaagatctaaccaaatcacatctcttgaaagatagggtaatttaccacacaagtgatttgagcttagatcaataacgtggatagatattggattctttaatgtagtcccaatctcaccatggatatgattacgagagaggtttaaatacgaaacctgagaaagtgcttcccacatctgtgtgggaatagaaccgaaaatccccgtgttagatagtccaacatattgaagttggttttgtgactgaatccacaatggaaagctgggacctaactgccatgatgtcacttccaaataggtaagttgaaaattaggaatccaattgggacccacttttaaagtgaaattgttccccgatgcgacaaactccgtcaagcttgtaagatttgcaagatcatcttccttgacaactccgtgaaaaagattgccgtcaatatgaagagataacaatttagagagtgatcgaagactttcaaatggatttccactgaatttattcatagagagatcgagatatcttaatgatgaaagttttccaaatgatctaggaagagcaccaccaattgagttgttggaaaaatctagcagatcaatatttttaaatgctccaatatgatctgtcagattgcctgaaagtcgtgaactctgaactacaagtgttgtgagtccatgggaaatacaaggagcaagaatttctaaaagttcattaacctgttggttgagtttgagatatgataaatctatcacccttaagttgcagagattacccaaagaagttggaatgtttccttcaagttgattacgtgataaatgaagttcaacaagagaagtcaaattacccaaacaagttggaatgtttccttcaagttgattaattgataaatcaagttcaacaagagaagtcaaatttcccaaggcatcagaaatagtcccatgcaagttgctggaacttaggtccaaagacttgagacgatgaagaccgtataagcaatcaggtatagaagatgagaatgaattgaaagacaagtcaagaattagaagaagtgagaggtttcgaataccaccaggaatcggaccttgaatttcatttccctgtaattgaagagaaacaagtttcttcaatttgaatatccacttggggacaaaagaaatggcagtatcggaaagatcgagagtttgcagagatgagaagttgagcaaggatggttcattatagtgagggagtgtgcatcctgacaaagataggtgggtcaaagaaggaagagattggagagtgtgtagccaatgaaatgctttggataggtttgcattactcaaataaagatattcaagcttccacatacttgatacccatcctacattttcagctaacagatcataactacctccaaggccaagatagaccaaattggagagattcccaatctgagatggaatcttccccatgaatggagtataagagaggtcgaggtgagtcaaggaggtcattgcacaaaggaaagaaggaattgccataccttcaaaatcattgtagctcaagtcaagatatcgaagcttagagagattcccgatctgaggaggaatcttcccactgaatgcagtctgagagaggttgaggtgagtcaaggaagtcattgtcccaaggaaagaaggaattgacataccttctccaaggaaataattgccgctcaagtccaagtaattcaaatgctttaaatcagccaaacaaggacttatctctccaccaaagctccatctccgataagcttcctcatcgaatctatggtagaatccattatagtagtcatacttgaaagcataatatgaagtgttgaggtgaagctgaagaacatgggaagtaaggttgtggcagaggactccataccagtggcaacagttggtatgattatgattccaagaccaaagcctatttgaaggatctatgagattattcttaatcttcataagtgtctcacgctcacttgggatgcacacactctctctgcaatcaccataaggtaaactaaacaaccaaaggtggacaaagacaagaatataaataatggaggaggaattcatgatcatgcaacgcaaatatagaaaacgagtgtttttttttagagctgaaacaagtgtagttgttggttctgcatataaatcatcaaacttctattatttatactgctgccctgcctgtttttctctttcacttttcattattttttaccttttttattattgtgccaaatactaaattatcgacttaattatccaattctcccgaattaattcttagaatacgaaaatttttgtatttactgtatcaatctccctttttaaaattcctatatacactaaattcataaaaaaatcaaaattaataacaaagaaatatgatttattcttgtgctgaatactaacataagaaacattctttttggtacagttttttttttttcaaaaataagtaagaatcattttattttaatttatcctataataccgcttaaatgaaaatttggtgtcactaaaattcaaattttaacttttatttaatcaatcctttcgttaaacttttgttacgtacaaaagtccaatatttttttaagaaaaaaatcaagtcttctatttcatcaaatcccaacccatgattaatattaaattatcaaattttcaatattcaaactaaaaataatgtaaaagaaaattgtcttctaaatcatagctcacacaatcaagtcaatctcaaggtttttcattttttcatcttgaacctttggacaccccacaaagtctagccatgatgttaaggtctgacttcttcaacttgaaccataggtcactgcattaccttcatatcaaacaattgttgcgagttaagtcaagcaaggaaaaaaaatataattgatgaataaatcaattataggaaaagagtttacattaaagacaattttggttaaaaaaatctataaaaaaaattatttcgttccaagctagctatttaattttgatcaatttttcaattcacaaaataatattcttcttatatgtgaaaaagactaattaatcttcattgtcattaatgattgttgtgttgtctatttctaattttttttaatcataatattattttcttttttattaaaaattaattagtgagatacaaagaagtttaaattgcttgtttagcttggtctatcataattattgagataataatttttccttttataagtcttgttccaaatttctccatgtattgtagatcatatttaacttaaaaagtaaattagaagatctacaaagaagtgtggcatgttttttaaattataaaattatggtcctagctatttattgttagaccacaagtcttcatatattaaagtttttgtctaaatttcatttatggtgatagtttaagaatagtgatagaagaaaaataaatatacaatttattgaaatatctaactcaattaattgatgaatacatcaattataggaaaagggtgtactttaaagactatttctattaaaaaatctataaaaaattatttcgttccaatataattatttaattttaatcaatttctcagttcacaaaataatattctcttatataggaaaaaaagactaaatttaattatcatcaattggaaaagttattgtgtcatgtatttctaattgtattagaacttgaatattattttatttatcatataaaaattaattagttatataaaagaagtaaaaagaatattaactttttttctcaaaaaaaatcagtatcatattttatgttttttacaagttatcaacttaaataagaggagaaacataattttaatttccattttattttttaaatatttgcaagtgccaaatttaaataatcatgagaatactcatgtttaatataatattctaaaaaaaaaaccatacgataacttaaacaatctacaaacaaatataatttattcttgtgctaaatactaaaacaagaaacatttttttattttagtttaccatatagaattgcttaaatcaatgaaatttttattttaagaaaatattaatgatttttttaaaattttaagtattttacatcaaagataattaaatttggcttaattagtcttcaaattttaactattattcaaatcaaacctttcgttaaacctgtacgtgttaagtaaacaacaaaaagtcttgccttataaaattcaaatattctattacatgcggtttgaacccataattaattttaaactatcaaattttaattattcaaaataaaagaaatgaaaacaaaattgtctcctagagaaaccgctggccactccaccaaattcatatcaaggtccccacttttccaacttgaaccatagactactccatcaagtccatgtcaagatcttccattttttcatcttgaaccttaggacactccacaaagtccacccatattaaggtctctgacttcttcaacttctgcaacgcatatatagaaaacaacttaattgtataagtgcttcttgcttctgcatataaatcataaaacttctattatttatactgctgcaagtgtctttcttttcttttttcttttttttatgacgtttcctttttttaattattgactttattatccaattcccccgagttaattcttagaataggaaataattttgaatttactttatctatctccctttttaaaattcctatatacacaaaattttgtattgaatttaactattatttaattttgattaatcaatcctttcgttaaaattttgttaattaaacaataaaagtccaacattttattaaaaaaattcaagtcttctatttctaattatatttgaacttgaatattatttttttatcatataaaaattaattagttatgtaaaaagaagtgtgaaaaagactattaactttttttctccaaaaaatcagtatcatattttatattttttacaagttatcaacttaaataagaggagaaacattattttaatttccattttactttttaaataattttcaagtgtcaaacttaaacaatcataaaaatactcacgttcaatataatattctcaaaaagaaaaatattgatacgataacttaaaaaatcaacaaagaaatataatttattcttgtgccaaatactaaaataggaaacttttttattttagtttaccgtatagaattacttaaatcaatgaaagttttattttaagaaaatattaattattttttaaaactttgagtagtttacatctaaggtaattaaatttagcttaattagtcttcaaattttaactattatttaaatcaatcctctaagtatataacaaaaagtcttacattataaaattcgaatattctattacttggaatttgaacccataattaattttaaactatcaaaattttattattcaaaattaaaaaaatgaaaaacaaaattttttcctagacaaatcgctggctactccaccaaatccatatcaaggtccccattttttcaacttgaaccataggctactccatcaagtccatgtcaagctcctccattttttcatcttgaaccttaggacactccacaaagtccagccatactaaggtctctgacttcttcaacttgatccatatcccataggccactccaccaatttcatgacaatgtccccccacttcttcaacttgaaccataggtcactacattaccttcatatcaagttctttatcattgacaacaaatgtttagaattaagtaaggaaggaaaaaattataaatgatgaatacatcaattatagaaaaagaatctaatttagagactatttagattaaaaaatctatataaaaaagattattttgttccaatttagttatttaattttgatttattttttaattcataaaataatattcttcttatatgtaaaaaaagactaattttcattgttattaattggaaagattgttgtgtcgtttatttctaatcgtattttaacctgaatattattttcttttccattaaaagttaattagtgagatataaagaagtgtaaattgcttgtttaacttggtttatcataattattgagatcatagttttttctttaataagtcttggtccaaatttctccatgtattaaaaagtaaattagaagatctacaaattaagaagtgtggcatgttttttaaattataaaattatggtcctagctatttattgttagaccacaagtcttcatatattaaagtttttgtctaaatttcatttacttatgtggtgatagtttaagaataatgatagaagagaaaaataaatatacaatttattgaaatatttaactcccttgtgcgaattagtcaaactcccttgtcactaggtccatctagtgattaaaaatataatcaaacaattcaataaaacacagtctaattgtcgctattgtaattcaataattgtattatattttttatgttaataaatttcttaaaaaagattggtgtttttagtagaatgaaagcaattaatacattgatttcaatgcattaattgaattctgatttgacttttaatttaaaaactgcatataaatgtttttaaaactattgtgtggtttccctggaaaaaaaactattgtatggttctattataattgactgaatttgagtttgaaaatattttttttatgaaattaaaattaaagataaaaatataaaagtttaattgcattctttattcttcaggtacagtaattgtgggattttggtctattgtaagttccaattgggagaattggattggatccactaggcattgcaatttcaatccctccatccatctttctttgaatatttaacagatatttactggcatgacactagatgaaaggtagataatatgacaactaccatgttgcctaacacatactgaactaaacttttgatcccttagaatattgcagttataaggaagcagaagtgaataagccacatctaagggaccaaattaaacttacaaaattataatacctaatttacgtaatgcatggagatcaaaagtgaaattaaactaaatataaattatgagcgaataatctgtcttcattgtctgaggagcaaaaggacttgacaagtgttttgtattttttttttttgtacatgcatatatagtgtatatgctattctttttttctattttttttccctacatttatgatctcggaactgaaacagtgagagaaaccgatgtgaaaatagatagggtggatgaagaactagacatcggccagtggaagaaaatgaacagatggaaaaccatctttttgggtatttccctatttctttaataaagataccagctcctctctctctaatacacacactggtgatacaggtgtgatggaaaccctatatctgatagcttgaaactttattttgtatgagggaattcaatacaactagtgacccttgtataaaacgataggaactattatgaataaaaaagtaatatttcatgatttttaaaatttaatcaatcatgatttgtcaaatgaacttgttaatgagtattatagaataaatgcatcaatactcaggaaatgggaatgtggaatgtatcagagtaaggaaaagcgagagaaggaagatgtggaagagcttagaaactgcagaatcctatgcaagctccaactttctacactaattaaattcattcaggcaaattcttagttacatgttgtgtaaaacaatcttcttaaatccaatcaccgagtgtgtcatttcagttattttaatgctaatcattgttagtgcacagatagtagaagacaataatgcgtcataaatacaaaacagaatttgatactcaagtctcaggctcgtctagttctcttaacattaagaacatttaataccaatgaaagcaaaacagacagaacaccacagatgaacaggtacatagtatgataaaccttttgatagcattatgcagaacaaggccacagataacaacaacagcagcactaacaggcccaagagagtgacccacagacccacatacctggaagacttcgtgtgaagctctgatgctattcaagaagctacccttggttcaatttcccgcgtgtttaatttcccacgtgttcctttagctgttagaattcgaaattctgttataacaaaccagagcaaaatatcttgtaagaaagctattataaaagcatgaatgaataaacggggtagcagagaagaatattttactgcaaaattagtttactcatcttctatttagcttttctgttaattggtccactgagattcgtatcaccttttcacatttttaatggctagactaacacgttgtaatgtctcacttcttaacagttaacaggtaaactcataatttcccaagtaaccttcttaccttcaaaactatcatcacataaatcagatctcgcaagtggtcaagataatgaaaataagcacgcctccaagttctgttgaagaaaacaacactgcaaaaacccccaaaatcctgctgcaaatccaactcccataccgatataaaactctgatgttccaaagaaattaccatcaccgtgtccaacagaagcactctctgtcaactcttccttgtctgtgcaattttttgttacaggaggaccacaaagctcaggatttccagtctaagttcttcaaagctctgaagttgggtgctcgtgggaattctgcctgataagttgtggtatgatagattcaggaaactgaggaaggacaaatcagataagctttgagggatttgacctgaaatgttgtttagtgagagatcaagggattctaacaatttcatttttcccatgtcatttggtatctctccagacagatgatttctagacaagttcaaaaaccgaaaagcagatagcatggaaatttcagatggaattgctccagacagcttattacttgaaagatcaatcattctcaccaatatcagattgtctgtgtactctaactcatctccattgggaacaaagacaagagtttccttgtagtggttataactgaagtcagagccatatgaataacttgaagggtttgcaaagaagtcatcttcaccagccattgttttcatgtcatccaaacaatttggaatggatcctgacaggctgttattgccaagatccagcactgtaagggaagaaagttgacacatcttttgagtaatgctgccattgaaattgttggatcttagacaaagaaccattagatattgcatttcccacatccaatctggtattgtgtcagaaagttggttatttcccatgtctatgaatttcattgtagagcaattttgcagtgttgaaggaatatatcctgagaagcggttgtcgtctaacagcaaagactcaagttgagacagataccccatggagtttggaatttcaccagacaaattgttactgcccaagttcacatgcaccaaagcttgccaatgcacccaacagtgaccaagatcaccagacaagacattatttgaaaaatcaagcacacttaacttattagtagcatttggctttccacataaaaagggagaaattgttccggaaattgagttattggcaacattcagcacttcaacatttggagacacacttggcaatctacccttgaacaaattagaactcaaatttatgacgctgtaatttagaaagatgttagataggtctccacttaacagattgtttgacagatccaggaattcaatttgcaaagtccaattccaaaaccaacttggaaccaagtctgcaatacctgccttagacattgtcaaaaccttcacagaactttgcctttttagccattctggaaacttaggacctattccaaaggagctcagtaaaacatattcaagctgaaaaggaggagcccatccagagttgacactgaggaacaagtttgtccaagacaaacgtagttcctttaatgtaaaaagttttacaaaatttgactcttttatagatccttataacaaattagatgaaaggtctaacgtcactaaatttgagagagttccaagagttacaggcacatcaccagtcaaagaattagctccaagatttaatacctgcaggtttttgaggaactcaaaactcttaggaatggttccattcagtgggttgtgagccaggtttaaagttttcaaggatgacaaatttgcaaatggtgagggaattggacaagtaaaggtattattactgagatctagaacttcaagatgcttaagctggcctaatgaatctggaagtggcccactgagttgattgttctgcaagtctagattttttatgttctgtaggcttgatattatttgtggaatttcaccctgtaaaaggttactgtgtaaatcaagttggacaagagttttgctgagattaaatagccatgaagggatttgctgattgagattgttatttgaaagatcaaggacttggagatgtgtgaagttggtttttccttttggtggtcctaagttatcaatttgacagctctccaagtgtagttctgaaagagatggaagtgcactcagtacttgaagccacttaccttgtttatgaaggtctgaaccactcaaatcaaggtactccaaggaagatagccttgatatccaattaaggttatctatctgaagagcataattgtatccaagattaaggtgctgcaggtttgagaggtttcctagttgatgtgggattaatcccatgaacccacttaagctaaggtccaagtatctcagactctccaatgagcctaggaagcttggtattggagtaagaacaaaataatttgaactcaagtccaaatgattcaaatattttagtccaagcaaagaaggactaatctctccactcaactccctatagggagagcccacaggtgtgtcaagattgatttccatgacttgaccagtgttgttgcagtgaacccctggccatgtacagcaatccgatttgtcagaccatgatgaaagcctgtttgatgggtctgctagtccatgcttgaagctgaggagtgcattcctttccttctcactgcaagtcatattgagctttgctgccttgcttgcactgaagtggagagttgttgcagtggacaatatcaagagaagaacatgagttgcaaatagcactgccatgaagaggaaggaagacgaaaaaggttgaatccacaattttctggttcacgattggtatttactactaacaatgcctatgtaggatatataccgtagaagggttagcatttaaaattttactccactaatggtggtggttgcaaaatgcacacatatgtagaggtatatatgtcaacaacgagacatttaggattaaaagtgtctaaccacaccaccattattttgcactagtttattttattttgatttaattactcttttagtccttatagttgtgataatttttttttagtccctataatttaagacattcattttggttcctatatttacattttttttacctttttgtcctcgcggggaagattcaaatcacacataaacatgaacaaaattaataaaaatagggaagcaagctcaggtacaactgaagtgtaatggaggtatgagacaaaggcactacacattccattattcttgagtctgccaccgacctctgaaagcttagcatttgccaattgccatgatgtaatctccttctttactatgtctcatcaagttggagtggtatcacagaattgaactaagttgatcgttccaatgggatgatggttttgattgctgcagataaagtgtgtgattgtgagtttctggttccatgagtaacagaggtgtggtagtttgtgccttcatggttgggatgatgttgcaggtgccggtttgttgttgagagaaaagatgatcagccatgtctcgtgtgtgcataggagagtgtatttgccctctccataacattagtttcaacaattgactttagtcgaaacttgagggtgagaatcaaagagtgaaaaaaaaaattcaaccggtactaaaatagaatgatttaaactataagaattaaaaagaaatattgtcgtaacttcaagggtcaaaaggataattaaaccttttattttttttttgtaaaaacaggtttggaatttgcaactttgaattctatctaattaagctctcaatcttccgtttctgcaactctatttgggtagaaagagaagaaatctgggcctaactcaaccctaaaagctaactcatagggtgagggttaccctcaccttataaactctatcttgagactatctctaactaatgtgggacttgtgtttttttttttaattcacccctcacgtctagcactctttgggcatggtgcgtaatccttttgaatggatctaggatacgttctgataccaagaagaaatttgggcctaacgaaaagaaaccaaatcgtagggttagcatttaaaattgttggtagttgattagatgatagttgatagttttagagaatttttttagaaagaaggctatgtcattgatttcttggattgatcaattacaacataccaattgcctatttataggcttaagtcaccaacctctcaatggtggtgaatgtttctacattactttaggtctttctagagttttcatgatagattagcatcatgatagttctagattcttctatcttatacataaacttatagttctagattgttctaccatacacattatagttctagattgttttaccatattctatatttctaggatattctactatatacatattatatttaagaacattctagaaatttgtagcaatttcaacactcctccttgatgcaaatttttgtgactccgagcatagctcgtaattcttcaaatcttggtcttggcaaagccttcgtgaatatgtctgcaatttgatcttctgttctgcagtagtcgagtttgatctctttagttgcttcagcttctctaataaagtgatacttgattgctatgtgttttgttctattgtgatgaactggattcttcgtcattgcaattactgatttgttgtcgcagttgattttagtaggcttatcttgtttttctcccatgtcttcaagtatcctacgaagccatatagcttgactcgttgcttcagcagctgccacgtactctgcttctgctgttgattgtgcaactgtagcttgcttcttcgacgcccaagagaacattcctaatcctagtgagaaagcatagccagaggtactcttcatgtcatctgctgaacctgcccaatcactgtcggtgtagccaagtaattctgagttggtttcggtagtataccatataccgaactcttttgttccttgtagatacctcaaaattctttttcctgctccaaagtgtatttgacttgggctttgcatgaatcttgatagaagacttgtagcatacattatgtcaggccgtgtagctgttaaatataggaggcttccaattagacttcggtatttggatgcatcagcttctagtgctccatcattcttctgtagtttctcatttgttttgagtggagtagcaacaggtttgcaaccatacatcttgaatttcttaagtaagccttctgtgtatttcttttgcgagatgaatatcccgtcatttctctgacttacctctatgccgaggaagtaactcatcaaaccaaggtcggtcatctcaaaggtcttcatcatgtcttctttaaactccatcatcatcttagtattgtttcccgtgtagataagatcatctacatatagagagagtaagagagtgtactgcccttgagacttgatgtaaagtgtaggctcactcttgctcctcctgaatcctcgatccatgaaatactgatcgattctgctataccatgctcgaggtgcttgcttcaaaccgtagagtgcttttcttagttttaacactttgttttctttgccttcagacacgaatccttgtggctgctccacatagatctcttcttcaagtacgccattaaggaaggaggatttgacatctagttgatggatactccatcctttttgtgacgcaagagctattagagctcttatggtattaagatgagctactggtgcaaatgtctcattatagtcaattccgggttgctgtgagtaacccttagctactagcctcgccttgtgtttttgtatggtgccatcagggttgagctttgtcttatagacccacttaaccccaatgatatcttttccatggggacgatttactaactcccatgtgttgtttttctcgatcatctgtatctcttcttccattgccttgacccatacttcctgctttgacgcttcttcaaagcttccaggttcaagtatggccaagttgcaggtttcatatatgtccatcaaagatcttactcgtcttggagtagactctggtgatgatagttcttgatcttgttgttgtgttggaggtgaaggtggttcacctgggtcttcttcctcatcttcttcttgaggtagttgagcgggtataagaacgttcttctccactttttcttcatcccaattccatgaagcatattcatcaacttcaacatctcgactgatgacgagtttcttagtttgtaagttgtagacacggtagcccttagagatattgctatacccaaggaagatacctcgtatagtcttgtcttcaagcttgtgcctcttcacgtctggaatatgaatgtagcatatagatccaaagacccttaggtgctttgctgatggcttcttcccgttccaagcttcaattggagtcttatcttttacagacttagttggacatttgttgactatgtaaacagcagtgtagactgcttcagcccaaaatgtgttaggtagtcccttttccttgagcatcgatgtaacatcctagaaatttctacccggagtttacggaaacgatgtattttgaatgattatatatatatataagtattattcaatgtacatgcctatatgttcttggtagaagtaggaatagtgggggcaagatacgcgagttaggctaattaagggagagaaatccataactgggaggttatgggttaattcctaattaattagttaaaaatcatcgttttgcgtgcgacttagaatttaacgaaaccaacctctgaaccacgctcggggttttattctgagcgttttgatatatatattgcttgctttcgaaaactggcccggcggacgcagagaaacgcgagaaactggaatcagagaattggcacgcaaaccgaggcaggattttagcgtttcaaaggtcagatttttctcacttttgtggctgagtatgggtcacagtcaaaagagaaagtgggccctttttgctccagtcaaatagggacatgtggcagagcttgaataaaataatggaaaaagggaaaaccctttttatttaaaaccaaaaagcttttctctctcctcactcagccaaagcagaaattcagaagccttttctctccctctctcacgtagctttcttcttcttcattctccattgaagcttcaagcaaagcttcaacctttggccatcatttctgccccaaatcgtgaaaggagagcatttttggagtcgtgaagtgcgtggctacgagtgggacttcgaaatttcaggtttgggtggacttctttctctcttaaatttcgtgggtatggggttttgggagatatgatgggtggttttgttagttttctgctgtgtgatgattatttgtgaagacatttgctgaaaacttgttgaaattgccatgtttggatgagttaaacatacccattctgttttagggttttgtgatgatgtttgtgatgttgtaggctgaaaaattgctgatggaaaactgttagagatgaagggtagagttaacctagggttggaaagtgagaatgtggtgttgtgagtggaaaaagagtgaggctttgagagttggaaggctaagtctgaattctgtggtaaatagaggttaaagtgagttaatactagcttgaaatgtcatttaggacatgtgagaaagcttggactgtgctagagagaaaaacaaatgatcaaagtgaataaagagtcatttctagggcaaatttgggtgttgaagagtcaaattttgattcggtgagattttaggtgtaaatccggtttgaacaagtctaaatagatgttatggactggtgtgaggtgagagtttgcttcaaatttacctcattctcaatttcacttttcaaaccttgaaaatccattaaaatgaggagttttgaacacctagattttgtgttgctgtggtttgaagcttgactttggtttagacatgattgatacatgaattgggacttgtaggatttgatttgggcaagattggatgaggggaagtgtggttttcgaaatatgctctttgtgcagattttgctgtaaaattgtgcagcagaattttgcacaagtgcagaaaaatccatgtatttgctggttgtggaaagagtaatgtagaatgagttctggatgtttgctagtagatcccaacagtcaaaatataggcttatgcactatagacttccagtaaaattttggagtcgatccaacggttaacgaattggatcgaaggaattgttactggggtctttaagtgagaaaagctgtgattttggttagtgtgttgagcagaattttctgccttgccctgttttgcttggctgtgatagcttgtgctgtttgaatgttgttttgcttggatgttgtggaagcttgggaggattgatggggacccggtgttgagagaaacgaggatatgggctacgtgggagtacgtgagctcagttggaggtgggaaacaggggatggtgggtttatgcgcgcattgtggatgtggaaaacttgttgtgcaccatcgcccgaccgccacctagtaccacatgtgatgggtaccccataatcctacaagcttgagatgaggaagtgttgaagggtgaacttcctgcttttattgttgaccacagagtggtacctggagatatgtcgcgggggtcaggagaccttggggacgtcaggtggggtgttattgcccaaaaccaagcttgaccaatcccgacccaacccgggcatagtcggtcagtgagaacctgtgatgtacctaagcaggcgagctcctggcagtcaacagataaaaggaacaaagaccacaaagcaaggaggcttgtggtggctggccagctgtgaaacttgactgatatgtgagatatggtctctggtaatcgattaccaagggtgggtaatcgattacaaggcttaaaaatgaagacagaaggctaagatggtctctggtaatcgattaccaaggggtgtaatcgattaccaggcttgaaaacgaagtcaggaaacttagggagcctctggtaatcgattaccagcctgtgtaatcgattacacagagggatgggtcactggtaatcgattaccaggcatgtgtaatcgattacacagtgcatttttgcatatttcatgtcctgaggctgtgtaattcaagtttagcctctggtaatcgattaccaaggctgtgtaatcgattaccagagatgaaaagccttaagatactccttttaatgtcatgtagtggttatgagatgcattgtgcggcggcatagttagattcttgtgaaagagtctacccctttcttttcttccttgtagatcgtgatggcggcgcagctaatccatgatcgagtagagatggagtgcctagagggagcctgggagaccctcgaaggcaacacgaggtaccgatttcggggcaccattcgattcacggctacttctttggtgcatccagatgaacttgcacggacgcttcagcgcacggtggagtggacagctccttggattagttttgtatattttgagggtgggtgtatctaggactgactgttaggtttactcttttgtttttgtatgggtagacctgatgtataggaatttgatgattgtatacttgtggctgaagccaccactatggacacctttgctttggatgacactatatattttgtaaaactcccatattttggacagctttaaatgatgaatgcatttatgatcgatcttgttatttgaaaagaaagcattagcaactttatttgtaaaagagtttatcgaccgtattttattcttttattttcatgtgacgacctaaagtaatggctggtacattcttccttttgaaacagcaaaatagtttagagattatgagcggtaagaaagaaatgactccgaatagagttgtgaactggccattcaggactctgtagtgaggattttccttctaaacctagttatggtgaaaagagaaagaaatgaaaaagaaaaagaagaaaaaaaaaattaccatggtttttgttatttaaattattactattaaaccagtcattaatttagggacgccacaatcgatctagccatctccataactgtgcgattctttctctcggacactccattttgttgaggagaatatgcgactgtaagttgtctctcaatgtcttcatcctcacaaaatctttcaaactcacgagaggtgtactctttgtcgcgatcacttcttagtacttttatccgttttccactttgattttcagcaagggccttgaactttttgaatactccaaagactcttgatttttcttttagaaaatatacccatgtcattctagagaagtcatcaatgaagagtatgaagtacctgttgttcccatgtgatggcgtcctcattggtccacaaacgtccgtatgtatcagctccaatagatctttcgctctccatgctccacttgttgagaaaggaaatcggtgttgcttaccaagaagacatccttcacacacttcattgttctcctttatgcttggaagatctctcatcatgttcttctcatgtaacaacttcaaggcatgtgagttgaagtggccaaatctttgatgccatagccatgaatcatcaacttgtaccttcatggcaatgtttgttgcatattttaaatttagagggaagcttctattgctcttattcatctttacttgggctatctcaaaccttttatttttgttgtctaagatttttcatacacctccttcaaagtgaagtgtgtagcctctctccatcatttggccaatgcttagaagattttcttttaggctgggaactagtaagacatcatggatgagtcgcgtacctttatctgtctccaccatgacagtgcctttgccttttgattcaaccacacttccatttcccagtcaaactttgactttgacagactcatcaatacttttgaaaatagtctcatccttggccatgtgattgctacatccactatccaagtaccagtttcctcccttttcttttattgagtcttgaatggcatagaacgtacattgttcttgatcatgctcttctgcgatattagcttgatgcctatttttgttgcgacaatttttctctacgtgcccgaacttcttgcaatggttgcattgtggcatattacggaaccaacaatttttctctacgtggccttgccttttgcatatattgcatggagaatttttatctgttttgttcttaaggaaattcctagaaccttctcttcttctagaagtttctccataatttttctttcctctattttctttgttttggggctgaaatttaaactttgactggaaggcattttcaattgtatcttctttatgcctatacagtctttgctcatatgcttcaagagagcccacaagttctgtctctaatagagtggacagatctttgatttcctcaatcattgtcacgattgggtcaaacttttggggcatagtaattagaattttctcaacaattttcttgtcaagaatatcttccccaaaagctctcatttgattaactattcctttaactttagaatagtaatctttaactgtctcggactccttcatcttcaatagttcaaaatctcttcttagagattgaagtttaacggcacgtaccttaacacttccttgaaactcctcctgcaatgtgttccatgcttctttggcagtcttagctcccataattcttggaaaaattggatcagtcaccgcttgttgcaaggtgaacaatgcctttgaatttttttgtttatttttcttcaactctttttcttgagatgcattaagagctgaagtatccgcggaaatggtgaagccttcttctactatgtcccataaatcttgagatgaaaaatatgttttccatgttaacacgcaagaannnnnnnnnnnnnnnnnnnnnnnnnnnnnnnnnnnnnnnnnnnnnnnnnnnnnnnnnnnnnnnnnnnnnnnnnnnnnnnnnnnnnnnnnnnnnnnnnnnnagttgacgattgagtagtgttatccatagcttagaaaaaatattattagagtgggttaatagtacaaaggaaaatttttgaagtagttgggaggattttgaaatggtaggtaggtaatataactacacccaatgtatgaccgaacgtagctctgatatcactgttggtagttgattagatgatagttgatagttttagagaatttttttagaaagaaggctatgtcattgatttcttggattgatcaattacaacataccaattgtctatttataggcttaagtcaccaacctctcaatggtggtgaatgtttctacattactttaggtctttctagagttttcatgatagattagcatcatgatagttctagattcttctatcttatacatatagacttatagttctagattgttctaccatacacattatagttctagattgttctactatattctatatttctaggatattctactatatacatattatatttaagaacattctagaaattgtagcaatttcaacaaaaaatttactccactaatggtggtggttgcaaaatgcacacatatgtagaagtatatatgtcaacaacgagacatttaggattaaaagtgtctaaccacaccaccattattttgcactagtttattttattttgatttaattactcttttagtccttatagttgtgataattttttttagtccctataatttaagacattcattttggttcctatatttacatttttttttacctttttgtcctcacggggaagattcaactcacacataaacatgaacaaaattaataaaaatagggaagcaagctgaggtacaactgaagtgtaatggaggtatgagacaaaggcactacacattccattattcttgagtctgccaccgacctctgaaagcttagcatttgccaattgccatgatgtaatctccttctttactgtgtctcatcaagttggagtggtatgacagcattgaactaagttgatcgttccaatgggatgatggttttgattgctgcagataaagtgtgtgattgtgagtttctggttccatgagtaacagaggtgtggtagtttgtgccttcatggttgggatgatgttgcaggtgccggtttgttgttgagagaaaagatgatcagccatgtctcgtgtgtgcataggagtgtctttgccctctccataacattagtttcaacaattgactttagtcgaaacttgatggtgagaatcaaagagtcaaaaaaaaaattcaaccggaactaaaatagaatgatttaaactataagaattaaaaagaaatattgtcgtaactttaagggtcaaaaggataattaaaccttttattttttttttttgtaaaaacaggtttggaatttgaaactttgaattctatctaattaagctcttagtcttccgtttttgcaactctatttgggtagaaagagaagaaatttgggcctaactcaaccctaaaaactagctcataagatgagggttgccctcaccttataaactctatcttgagactatctctaaccaatgtgagacttagattttttttttaattcaccacttacgtctagcactttttggacatggtgcgtaatctgggcctaacggaaagaaaccaaatttgaagatacaacatttgatactataactgtttggtgttttgaaaacctcactcacatatttccaaatgttacagaagactttgattcagtggttattacgaattccttcctagccttttttaccaagtcagggaatttgcattgttgtgcatgatggctgccacaaggacccttgtaccaacccattagtgcaagtggtttttttcttaggagaattgagaaacaaatgatgtgttttataaaaggaattcttttgctttgaattttgaacttataatgttttttgtttccctcacagaacaagtgatgaaactcttgacgccatacgtacgcctactttgatgctctttttttcattccacttttatcttaatggtatctcaagttaattagaatgtacgtataataaaataatgagaatggcaactactagtagtacttaattagaaaaaaaactatcaaaactaaaacgaaaataactttgatgatgttaatacatgagtttaatttagatagacagtgtaaaaatttaaattgttaattaattagatatcacctaatgatttgtaaaacaattactaaaaaacattataggagaatatatatagttaattgcaattctaagtgtatttaaattaaattcttaattaacatatccttattgtgattttttgtatattttttatttattgagacagtggaatgagaccgcactataattttcatcacgggtgtggttgtcaaatataatagggatggttagtgaggaattttggaatgttagttggttttcgactataacctcttgttcagtgttaacgttttcattagagttaagttgcttttagggaagaacaaatgtcttgaaattccctcttctccagaagcagttttattgtgtctttatcgaagccatcttctccagagacttaacttttaactttgaagataggaagtcaaacattgtttcactttatttggtttttttgcttggacaaatatgaaaaatacgctcaggatcaggtcctgttcgcaagaaggaagtctactatcccacacatgtactgcttaattatttaaggggctttaatatattttttatttttaataaatatctgattttatatatattttataataaatttttaatttatgataaatttttaataaactaataattttattttttataataaacacttatttttagttcctaataaatttttttttcttcattataaatatttttcatttattattaatacatattaaaataaaatttactagaaagtacacacattttttttaatttatcatagactaaaacaagatataagataaaaaataaaaatgttaatttattagaaattcaatataaaataaaaatttattaaaaaacaaacataaaaattaactatttattatggataaaaacatatttaatttcatatagtgttttggtctattagtgttatgttttttttatatattttttatagttatttcttttcaaatttgatgacaacattgtcattgggtctttctacccttcacatccgcaaattggacactaaagagagtcggtcagaaacaaataacatgagagaatttaacacttttggaataggaaaatgtactttttttaagaaaataaaattatgtttttaatccatgatttatattcgactttttcatcttttgacaatttttttcttcataaaaaatctctaatatttgaaatcttttgctttgaatcgctattattagttaaataataatgtatcggttaaatattcggtaacatttggtttctaataagtcaaaaaccgtcaatatttatttgaaacttgtcttccagtctccgtcaagcttctccacattcacactcatgaacactaagctctagacaaaattgaaatgatccagactaagtcaacaaactggtcttcttcagtgagttcacaatgaaaccacagaatttgttttcatccactagtttccttcccaattcccatgttttctaaaacataacacactacaaaaccttctaataatttttttttaaaaaaaaaccaacattttacatgtagcaccacaacttaacaatttctagctacaaccctgctctgtatactcattctaaacttgttccatagactataatataatctatctccactcattcattcatcaagattgaaaaatggattcaaatgcttgtctaccacacttgctagtgttagcaataacattggtattggttagtcatgcaatggaagattcagctcaagacaaacagagatgtgctgaatccctgacaggtgttgcaacgtgtctgccatatttgggtgctgacgcgaaagcacccacagcagattgttgcggtggtctcacacaagccatgaagaccaacaagaagtgtgtctgccttattctcaaagacagggatgttcctgaccttggcttaaagattaacatgacaattgctgttggtctcccttctctttgcaaaacacctgataatctctcacagtgctctggtatgttcaatttcaaattaagtcttccttttttcttgaagaacactacactacagtgttatgtttccatttcctatgcaatgagtcttgttagtggccatataacaactaatgtttttatctttcattgtctgatgataacatgtttttaataggaaaaaaaagagtctttatttctattttcaaaactatttttagttttcaagatacaactaaacaaggttcttgatagcaacaacaacattacggaagaaccagaggtagcagctaatagcagaccagcaaggaaccacaacagacccactcacctcagagattacgtttagccgcgacagcattagtgcactgcagttagttaggggacagagatagtgcttttcccaaattctgttatcctcaaattctgttataacagagtttgttattatctgctagaaaacaataagcagtgtaagcctgtaaatatcaagagaaaaggaatgaaaaagcacagaacagaatttgaatttgcttatcttctctttatttccttcgttttgctcttagcagatagcctctgctatcagttcttcagactgtttggcggagaatgatgtgagacacagaatgtgaaattgagagggaacttgaataagattaaaacagaagaagctgagaaaacaatttcccgttgtttttgtttttttggattttagaacacttattttggataggattctccaaacttatatattttggataagaaattgattactaagtagtctaaaattattttataaaacagtttcttaactgagaatactcaggccctaaatcttccaattttagtatatttctaaaaaaatcagaatatttgtggtctaagttttatcattatcaagcctttcattttccttaaagaacaaaagagtgttacattccatttactatgtaatgaatggtcaacaagtcatgtacttcaaactctacttttctcattcataactagacaataacacattttaaaggggaaaaaaagggcatctaaatttgccaattttactttgtttgtgtatctgttatctctgagttttcaactgcgaaagttaaaaatatttgaggtttgattttttctcaagaaattcttgtttgaaacgatttgaacagcacttcttcacttggatcctaaatcacctgaagctcaagcttttaatcaaattggtcagaaatccaatggtggttctatcagtccttcgcccactacttctggtagtgatcctttcaacaaaatatttcatttttagaatttatttttgacattgacatttgagtttcaatggtgtagtactaaattttgcatttatttttaatgtgttcttttgtgcattcagctgaaggaagttcccagaatggtagaaaccaagggatagatgaaacggccacagctaagaatagtgcgtcttatatcgggaagagattgttagaaagtttggttgcagttgcagggcttctaatttggctttcatgagcttaactcaaatactacctatatattactattctcatatcacattgaaacgtaaaccattgattagttgatagtgtaaaaatatttacactcgagtgtattaaatctctgacagactcacaatagatattattgcaaaaccttattggagatttatttttgtgagcattttgcctttaatctcatacaactaaatgcttgttacacaaatcttattgttcagtcctaaaattcttttatctctaataagaaataacgacttgttgcaatagaaattaaaatcttattattttttttaagtacacttgaggatgattttggtatcccacttttcaattgctcggttcgtttccatattttcaaattttacaaatttgattcattagttaacttaattgatatcaaattttacattttggtatccatatttacaaaattaacaaactaatttttttttcctcgtaaagtctaaaactgataattcgtcaagcatgatatggtttctttagccaagtacaagataatctagattctacttgtatcctcccaagatagtctaagaatgaatgagttaagttgaatatggaaaaacaaatattcattaagatgttatggtttgattatcccaacaacttttctcaaatgattcaacttgttgaattgagctttcctttctctgtaatgttgcatacaaagttggaggatcaaaaggggcaggcatggtgcaagggtcggtatttgcaggaaccttgaccaatgattccatcataaatttctttactgatccttctgctccacaaaccattgactccacacatagttctgtagcattagcacttatggagggtttgtatctgaagagtttagcatatgaattcaggagatgaaacatgtagccgtacacgtagagtggtagagtcacatgacagaatgtatttttgactgactgaccaagcagaaccttcaatgtacaccttatatctgcacgatcatgattgaattgaaacatttatttattgataaactgaacttatatatccaataacaaaaatatattattacatataattataactgaagcatgaatggacagttttaatgttatacctataagtgcattgacttggcaagtctgatttgttgaacccctcttgtgattctcgaaaccaatcctgaaacaaaattttcatttttcaagaaggaagctatatatgtggctttattgtgagtcaattaacagacaaaatatattgtttagaaggaaaaaatcagtaatgttcaataacaggttatttcctttgattttgaatgtacttttcagttgtgtattaataaaagattaaaagttaaaaaggtgtataatgttatatacaatattggtactggccattgtgttgcttgaatttgcctgttatttctagttgctgcacaccatgtgcttaagccaattttatataatgaaacttttgcttataagaaatattacgtacaaaattaattttttcatatccaaagaataaaactactttcagtaagtgtaatcaaacaaagctaataagaagtgtgatacctgggcaaataaacgagcattccaatcttgattttcagaaacattgcatttaatgaggtcttgtctggtttcagcaacagctggattacctttccagtaagcataaggctctctgttcagccatggtatcctcgtagtgccttctttcaaccctcccaacaaaatatgccatggctttatattaatctctgccctgtgcaccacacatacaatactttttacttatttaaaaattaaggtcgccttaggggtgattgtcaattttcaattttccattttaaaatataatttcgaaatacaaacatgttcaacaaaaattgcactaagttgattttttacatctttctgaaatggtttttatcacatacaacaaacaataaaattttgtttaatttattgattattgtttatgttttaacctttactgttattttttataatattttttaattatttttattatgtttaattcttttttatttatttttgtgtcaatatttttttaatattacatgattttatattggagtgtgataagattaaatatttaaattattttatctattaaataattttttaaaatctaaaaattaaaataaactgaaactaaaaactccaaacataaactgagtttaatttttaatgattttgaaaccgaacacaaagaactacttctagaattgtgtcccaaacaatgtaataaaaatataattctattgtatatttgtataacaaaatcatatttatgtaaaaagaatacttctagaattttctaattttctacccacatgggtaatgtgaatagcaatataaaatccaatatacttagcctgctacgatacgataaacaaattttgaaaattttcactcataaatggactcctttagaagtccacacataggtccttctagacttgaatgacaaattgaaaaggtaccaaaaaataaagattttgatataataatcacatgctaaaaggttaatttgtgtattgtgaattattgattttgtttattatatattctttttctttttttttcaaaattttaatttttgacagttttacactgatgacaaaatatttgtaataccttaacaacgttttatcacatgatttttacgtcataacccaagtgagaaatcatatgattatcacatcatcattatttaacagtgattttttatttatgaaagtgactgagcaatgacaaacagagttatagattaagaccgcccaaaagataattgagagactaataatcactttcgtagaaggatgaagaactaaaagttgataaaattcaaattcttaatcattcatttaaaaagttagaatctatcacactattcagaccaatcagtactaaagaacaatttataaatattaaccaaaaataatgaaagctggctacactggttttcaatgggaagagtctgagaaactacttagtattgagggaatggagcaatggcagattcatctgagagctctacatcatcaaaaggttgtggagcaatgccaccatacctgagcttttgatctcacccatttgtcgacgagcatttgcaccttctgctactgcacacaatttgggaagaaacacacctgtgcatacatgaaagacaaaacttataatttattagacaatttataatcgtatatcattttgtgtgttcagttctgaaaatgttttttagatgcgtattcataaaagataaaaataaatagaaaacaaaagtaactacatacaatattagatcaatttgtttttgttacaatattagatcaatttaattaagatagaaccgtatgtcaaatatataattcatgcattcaatgataaaaattagaattatttttagttaattagcaatgtaaaaattgatgctgtgttatagttttttatttctaaatcacaaggtatttttttattaaagataatctacttgttcaatagaaatagaattattatagatgatacgtttttatatataaatatttaatgtaattatatatttaagattaaaatttaaaacttccaattaaactaaaataagattacattaattgatcaatacacttagtgttttatggtgtgatagttagacaagatcatatcgatgcaagtgaacagtgtgagctaggtttgtatgatggctatgataatgaggaattaagtttggtcactagctactactactagtcaatggagaacctgttgctccaaactacctgcgatactttatgtttgaaagaaaacaaaaagattgctcctatactgcgtcctcatacagaaactatctcatgctgaaaattatgtatgatgtttttatatcataacacaacattatttttcatgatcaagtgaaaaaaattaataatattggatgcccccatagtgtgcaactacagaccttcagtttgcaagactgaagtctctacgtaccattgagctacaggggcaagaacattttgaatcaaaaattgatttttctattggttcttcctttcctcccttatactctcctcttttcataaaaaaggttagactcaataattttcatctttatgtttacaataatattttgttttatgtttttaatactaacctagagtctacatatcaaagttgctgaaaattatgttcattctcattcttggcgctgttagtctagtgtgaaaacggacaaattcagtttcctgttatatatggcactgtttataaaaaggaaataaaaaaaagtagaatttgattatggctaatttcacccattatatttattacaagaaaacctttagataaaaattatttttttgtacttttagcttggtcgtaaacattaacattacatcacgctaaattttatgaggaaggatgctataaatattaacaatacatctcacacacacaaagacatctaaaattatatcactatgttttatgatgtgttatgatttgctttaaaatatggtacaaggtttatcagagaccggcttataagtaaaaattaaatttgtcataaagggagtaaaatggaaaataattaatttctaaattagaattaaattagaataagctgtgcagatcttataatttttgttcactaattcgcccaccacataatgttttaatttttccaactttgtataatctaaaaagtataaaaatgaagattacgactttcagcctccagttccttttaatggaagaagtgagtaaatgttgatgcgatatcggtagcccccatagggtaatttagaatattactccaacaattttgttggttctcaagcatcattggttatctatggatatctcatcaaagttcttggcctggccggcttggagagtcaagtcttgtatgcagccacgagtcacgactttaattaacacgaaagaactaattattcacttcaatggttagtgactaaaattaaatataagtttttttcctattcaaccacgttttcttgaaacactagtcccccatttttggaaacaagaatatgatacacagaattgaacaactagttgatcttaactacaaatatgctcaatatgcaaatatgtacatcccaaaacagaatttaaataagactctcaaatttaaaaaaaaaaaaaaaaaaagaaagaagatagcaataactacaatgcaaattgaacaacctggcaatacaatgatacaacattggttgtaagcaacactaaacagtgatactatacgagtaaaaagattgaagtttgaaccacacatgatcaaggaaatgaaaataggcatgccgccatgatctacaaatcagcaaaggagcaatcactatccaaagtcccacaacaaatccaattgtcgcactaacaaaaaaccaattcactccatgcccatgacttccttcataactatgagttttcccattggagctgcagtttatgggcagtggtggaccacatagattgttgccaataaatctggaggcatcaaaggtttgcaattgagttcctgttggaatttttcccttcaaatgattataagacacgtctagcaagctcaaaaagctcaaattagaaatggttggagggatttcaccagaaatttgattccttgaaagatcaatggtttgtaacgatcccatattaccaataccttctggaataggaccaatcaattggttgtgggacaagttcaaaaagttcaatccatttagatctgtgatttctctaggaatatctcctaataatttgttacttgacagatcaatacttgttaccaaacccagaatgtttcgatactcatctcctcttacttttagccatagtagcacactaactatacctgataccgaagagtaatatgtatcatttggtgcatgagaatagatacggggatatgtactccggttcactagtgtcatggcactcaagttacggaaacagctgggtatattgccagacaaattattttttgcaaggtctaaaacctgaagaagactcatctgacatatttcatttggaatgtgaccggaaaaactgtttgatcgaaggcggaggattttcatatttgagagcttttctccaacccatgttggaatacatcctgaaagattattttctccaagatccaaggatatcaattggctagtcttcttcaaactggtaggaaatattcccgagagcaagttgttacgaatttctaatgactgcagctcagccaaggaacccatggatggggggaagttcccaacaaaatggttgctttgtaaattcacttccactagaaatggccaattaatccaacaatcaggtatttctcctgacagattattggatgcaagattgagaaattctaattgcattggcttgtcctgattgttacataaaaaatcttgcatggattcagagaatgaattggttgaaaggtctaagtcatacacatcatttgaaagatagggtaatttaccacataagtgatttgtgcttagatcaacagtttggatagatattggattttttattgtagtcacaagctcaccacggatatgattatgagagaggtttaaatacaaaacctgagaatgtgcttcccagaaccaagtgggaatagaatcgaaaatccccgtgttagatagtccaacatatttaagtttgttttgtgactgaatccacaatggaaagctgggacctaactgccatgatgtcacttccaaataggtaagttgaaaattaggaatccaattgggacccacttttaaagtgaaattgtttcccgatgcaccaaaatccgtcaagcttgtaagatttgcaagatcatcttccttgacaactccttgaaaattattgccatcaatccaaagagatgacaatttagagagtgatccaagactttcaaatggatttccactgaatttattaatagagagatcgagaaatgttaaatctatctcccttgagttgcggagatttcccaaaaaagtcggaattgttccttcaagttgattatatgacaaataaagtgcaacaagagaagtcaaatttcccaaagaagttggaatggttccttcaagttgattagctgataaatcaagttcaacaagagaagtcaaatttcccagggcatcagaaatagtcccatgcaagttgctggatcttaggtccaaagacttgagacgatgaagaccgtataagcaatcaggtatagaagatgagaatgaatttccagacaagtcaagattttgaataagtgtgaggtttcgaataccacaaggaatcggaccttggatttcattaccatgtaattgaagagaaacaagtttcttcaatttgaatatccacttggggacaaaagagatggcaggggaataactagtattgtaaagaatgagagtttgcagagatgagaagttgagcaaggatggttcattatagtgagggagtgtgcatcgaaacaaatataggtgggtcaaagaaggaagagattggagagtgtgtagccaatgaaatgctttggataggtttgcattactcaaataaagatattcaagcttccacatacttgatacccattctacattttcagctaacagaggttcgacaacagaatgacctccaaggccaagatacaccaaattggagagattcccaatctgagatggaattgtttcattggcggcatacgccaggtcaagatacaccaaatttgagagattccaaatctgagatggaatctacccatagaatccagtatcagagaggtcgaggtgagtcaaggaagtcattgtcccaaggaaagaaggaattgacatacctgctccaagtaaataattgccgctcaagtccaagtaattcaaatgctttaaatcagccaaacaaggacttatctctccaccaaagctccatctccaataagcttcctcatcggatgcaatgtagccatcatcgaaagcagaaggtgaactgtggaggtgaagctgaagaagatgggaagtaaggttgtggcagaggactccataccagtggcaacagttggtatgattatgattccaagaccaaagcctatttgaaggatctatgagattattcttaaacttcaaaagtgtctcacgctcacttgggatgcacacactctctctgcatggtaagctcaacaaccaaagctggacaaagacaagaatataaatggaggaattcatgatcacgcaagaatatatagaaaacaagtctacttcttgcttctgcatataaatcctaaaacttctattatttatactgctgccctgcctgtttttttcttcactttcattgttttttttacctttttttattattgtgcctaatactaaattatcgacttaattatccaattctcccgaattaattcttagaatacgaaaaattatgcatttactgtaattatctccttttttaaaattccaatgtacactaaattcataaaaaaaatcaaaattaataacaaaaaaatatgatttattcttgtggtcaatactaaaataagaaacattcttttttggaacagtttttttaacaattggaaaagttattgtgtcatgtatttttaattgtattcgaacttgaatattattttatttatcatataaaaattaattagttatataaaaagaaggaaaaagaatattaactttttttctaaaaaaaaaaaatcagtaacatattttatattttttacaagttatcaacttaaataagaggagaaacataattttaatttccatttaactttttaaataactgcaagtgtcaaatttaaacaatcatgagaatactcgcgttcaatataatattctcaaaaaaaaataaaaattcacacaataacttaaacaatctacaaagaaatataatttattcttgtgccaaatactaaaacaagaaacattttttattttggtttaccatatagaattgcttaaatcaatgaaatttttattttaagaaaatattaatgatttttttaaaactttaaataatttacatcaaaggtaattaaatttggcttaattagtcttcaaattttaactattattcaaatcaaccctttcattaaacctgataagtaaacaacaaaaagtcttgccttataaaattcaaatattctattacatgcggtttgaatccttaattaattttaaactatcaaattttaattattcgaaataaaagaaatgaaaacaaaattgtctcctagacaaaccactggccactccaccaaatccatatcaaggtccccacttttccaacttgaaccatagactactccatcaagtccatgtcaaggtcctccattttttcatcttgaaccttaggacactccccaaagtccagccatattaaggtctctgacttcttcaacttctacaacacatatatggaaaacaacttaattgtataagtgcttcttgtttttgcatataaatcataaaacttctattatttatgctgctgcaagtgtctttcttttcttttttcttttttttttatgacgtttcctttttttaattattgactttattatccaattcccccgagttaattcttagaataggaaataattttgaatttactttatctatctccctttttaaaattcctatatacacaaaattttgtattgaatttaactcaatgaaattttagatcacagtatagaattgtttaaatcaatgaaattttattttaagaaaatattaatcattttttaagactttaaatcaaaggtaattaaatttggtttaattaattttcaaaatttaactattatttaaatcaatcctttcgttacacctttgttaagtaaatgatagcatagcaagcaaggaggtgctagcagtaacactctcacaaagataaagatctttaagccatcattttttttccttttcttttctatgaactgtcatttcttatctctacatggaatgtctagaagttgaaaacttgagctttctttaactatactgctttccattttggcgaactgcttttctttctcataatgaactttccacttccaatgatgtttcaacattaataattctttatctattttttctaaaaatttccactcactttttgtgagtggtgtgaatgtcatgcagacaaatgatgtccaagcttcactttttccattcattgcaagttgtaagcagaatgtagattgtacgtataataaaataatgagaatggcaactactagtacgtatcaaaattagaacaaaagtatcaaaattaaaacgaaaataactttgatgctgttaatacatgagtttaattttgatacacagtgtaaaaatttaaattgttaattaattagaaatcacctaatgatttgtaaaacaattactaaaaaaagttataggagaatatatataattaattgcaattctaagtgtatttaaattaaattcttaattaacatatccttattgtgattttttgtatattttttatttattgagacagtggaatgagaccgcactataattttcatcacgggtgccggtttgttgttgaggcctcgagggaaaatgtattttttgaagaaaataaaattatgtatttaaattcatgatatatatttgactttgtatttgaactttgagaattttttttttcaaagaaaatttctaatatttaaaaaattgttttaaattaacattagttaaataatgacgtacccgtaaaatatttaataacacaaaattgatttatagtaagtcaaaaagcgtcaatattcatttgaaacttagtcttccacccgtctcaagctcttcacatgaacactaagctctagataaaaataaataaataacactaagcaagggacagatgaaacggccacagctaagaatcttatatagggaagagattgtctgaaagtttggttgcagttgcagggcttctaatttggctttcatgagcttaactcaaatattgcctatatatatatatatatatatatatatatatatatatatatatatatatatatatatatatatatatatatatcacnnnnnnnnnnnnnnnnnnnnnnnnnnnnnnnnnnnnnnnnnnnnnnnnnnnnnnnnnnnnnnnnnnnnnnnnnnnnnnnnnnnnnnnnnnnnnnnnnnnnnnnnnnnnnnnnnnnnnnnnnnnnnnnnnnnnnnnnnnnnnnnnnnnnnnnnnnnnnnnnnnnnnnnnnnnnnnnnnnnnnnnnnnnnnnnnnnnnnnnnnnnnnnnnnnnnnnnnnnnnnnnnnnnnnnnnnnnnnnnnnnnnnnnnnnnnnnnnnnnnnnnnnnnnnnnnnnnnnnnnnnnnnnnnnnnnnnnnnnnnnnnnnnnnnnnnnnnnnnnnnnnnnnnnnnnnnnnnnnnnnnnnnnnnnnnnnnnnnnnnnnnnnnnnnnnnnnnnnnnnnnnnnnnnnnnnnnnnnnnnnnnnnnnnnnnnnnnnnnnnnnnnnnnnnnnnnnnnnnnnnnnnnnnnnnnnnnnnnnnnnnnnnnnnnnnnnnnnnnnnnnnnnnnnnnnnnnnnnnnnnnnnnnnnnnnnnnnnnnnnnnnnnnnnnnnnnnnnnnnnnnnnnnnnnnnnnnnnnnnnnnnnnnnnnnnnnnnnnnnnnnnnnnnnnnnnnnnnnnnnnnnnnnnnnnnnnnnnnnnnnnnnnnnnnnnnnnnnnnnnnnnnnnnnnnnnnnnnnnnnnnnnnnnnnnnnnnnnnnnnnnnnnnnnnnnnnnnnnnnnnnnnnnnnnnnnnnnnnnnnnnnnnnnnnnnnnnnnnnnnnnnnnnnnnnnnnnnnnnnnnnnnnnnnnnnnnnnnnnnnnnnnnnnnnnnnnnnnnnnnnnnnnnnnnnnnnnnnnnnnnnnnnnnnnnnnnnnnnnnnnnnnnnnnnnnnnnnnnnnnnnnnnnnnnnnnnnnnnnnnnnnnnnnnnnnnnnnnnnnnnnnnnnnnnnnnnnnnnnnnnnnnnnnnnnnnnnnnnnnnnnnnnnnnnnnnnnnnnnnnnnnnnnnnnnnnnnnnnnnnnnnnnnnnnnnnnnnnnnnnnnnnnnnnnnnnnnnnnnnnnnnnnnnnnnnnnnnnnnnnnnnnnnnnnnnnnnnnnnnnnnnnnnnnnnnnnnnnnnnnnnnnnnnnnnnnnnnnnnnnnnnnnnnnnnnnnnnnnnnnnnnnnnnnnnnnnnnnnnnnnnnnnnnnnnnnnnnnnnnnnnnnnnnnnnnnnnnnnnnnnnnnnnnnnnnnnnnnnnnnnnnnnnnnnnnnnnnnnnnnnnnnnnnnnnnnnnnnnnnnnnnnnnnnnnnnnnnnnnnnnnnnnnnnnnnnnnnnnnnnnnnnnnnnnnnnnnnnnnnnnnnnnnnnnnnnnnnnnnnnnnnnnnnnnnnnnnnnnnnnnnnnnnnnnnnnnnnnnnnnnnnnnnnnnnnnnnnnnnnnnnnnnnnnnnnnnnnnnnnnnnnnnnnnnnnnnnnnnnnnnnnnnnnnnnnnnnnnnnnnnnnnnnnnnnnnnnnnnnnnnnnnnnnnnnnnnnnnnnnnnnnnnnnnnnnnnnnnnnnnnnnnnnnnnnnnnnnnnnnnnnnnnnnnnnnnnnnnnnnnnnnnnnnnnnnnnnnnnnnnnnnnnnnnnnnnnnnnnnnnnnnnnnnnnnnnnnnnnnnnnnnnnnnnnnnnnnnnnnnnnnnnnnnnnnnnnnnnnnnnnnnnnnnnnnnnnnnnnnnnnnnnnnnnnnnnnnnnnnnnnnnnnnnnnnnnnnnnnnnnnnnnnnnnnnnnnnnnnnnnnnnnnnnnnnnnnnnnnnnnnnnnnnnnnnnnnnnnnnnnnnnnnnnnnnnnnnnnnnnnnnnnnnnnnnnnnnnnnnnnnnnnnnnnnnnnnnnnnnnnnnnnnnnnnnnnnnnnnnnnnnnnnnnnnnnnnnnnnnnnnnnnnnnnnnnnnnnnnnnnnnnnnnnnnnnnnnnnnnnnnnnnnnnnnnnnnnnnnnnnnnnnnnnnnnnnnnnnnnnnnnnnnnnnnnnnnnnnnnnnnnnnnnnnnnnnnnnnnnnnnnnnnnnnnnnnnnnnnnnnnnnnnnnnnnnnnnnnnnnnnnnnnnnnnnnnnnnnnnnnnnnnnnnnnnnnnnnnnnnnnnnnnnnnnnnnnnnnnnnnnnnnnnnnnnnnnnnnnnnnnnnnnnnnnnnnnnnnnnnnnnnnnnnnnnnnnnnnnnnnnnnnnnnnnnnnnnnnnnnnnnnnnnnnnnnnnnnnnnnnnnnnnnnnnnnnnnnnnnnnnnnnnnnnnnnnnnnnnnnnnnnnnnnnnnnnnnnnnnnnnnnnnnnnnnnnnnnnnnnnnnnnnnnnnnnnnnnnnnnnnnnnnnnnnnnnnnnnnnnnnnnnnnnnnnnnnnnnnnnnnnnnnnnnnnnnnnnnnnnnnnnnnnnnnnnnnnnnnnnnnnnnnnnnnnnnnnnnnnnnnnnnnnnnnnnnnnnnnnnnnnnnnnnnnnnnnnnnnnnnnnnnnnnnnnnnnnnnnnnnnnnnnnnnnnnnnnnnnnnnnnnnnnnnnnnnnnnnnnnnnnnnnnnnnnnnnnnnnnnnnnnnnnnnnnnnnnnnnnnnnnnnnnnnnnnnnnnnnnnnnnnnnnnnnnnnnnnnnnnnnnnnnnnnnnnnnnnnnnnnnnnnnnnnnnnnnnnnnnnnnnnnnnnnnnnnnnnnnnnnnnnnnnnnnnnnnnnnnnnnnnnnnnnnnnnnnnnnnnnnnnnnnnnnnnnnnnnnnnnnnnnnnnnnnnnnnnnnnnnnnnnnnnnnnnnnnnnnnnnnnnnnnnnnnnnnnnnnnnnnnnnnnnnnnnnnnnnnnnnnnnnnnnnnnnnnnnnnnnnnnnnnnnnnnnnnnnnnnnnnnnnnnnnnnnnnnnnnnnnnnnnnnnnnnnnnnnnnnnnnnnnnnnnnnnnnnnnnnnnnnnnnnnnnnnnnnnnnnnnnnnnnnnnnnnnnnnnnnnnnnnnnnnnnnnnnnnnnnnnnnnnnnnnnnnnnnnnnnnnnnnnnnnnnnnnnnnnnnnnnnnnnnnnnnnnnnnnnnnnnnnnnnnnnnnnnnnnnnnnnnnnnnnnnnnnnnnnnnnnnnnnnnnnnnnnnnnnnnnnnnnnnnnnnnnnnnnnnnnnnnnnnnnnnnnnnnnnnnnnnnnnnnnnnnnnnnnnnnnnnnnnnnnnnnnnnnnnnnnnnnnnnnnnnnnnnnnnnnnnnnnnnnnnnnnnnnnnnnnnnnnnnnnnnnnnnnnnnnnnnnnnnnnnnnnnnnnnnnnnnnnnnnnnnnnnttgtatttaaacctaaatatgattttctttatcatataaaaattaattattgatataaaaagaagtggtgaaaaagaatttaacttttttctataaaaaatagtatcatattttgttttttttttataagttatcaacttaaataataggagaaacataatttttattttcattttactttttaaataggagaaacataatttttattttcattttactttttaaataattataagtgccaaatttaaacaatcataaaaatactcacgttcaatataatattctaaaaaatatatttatacgataacgtaaataatcttctacaaagaaatatattttatatgataacgtaaataatctgctatttattgtgcatcaaaatatgtaaaaataataattaacttgtaatttgtatggttggtatgggttgtttcatctatcctgtattttgttgtatcacacatataatcatttatatatatgggctactattgtcattaccaaaaatgctattgagactaccaaagcatttgaaattacttggttatccttagttccatttccccacacctcctatccttcccctctttacgttcagctactctccctctttacatccaaaaacagaatttaaataaggctctcaaatttgaaaaaaaaaaaaaaaagaagatagcaatgactacaaattgatcaacatgccaatacaatgataaaacttcggagtattctaagcaacactaaacagtgatactacctaagcgaaaagattgaagtttgaaccacacatgatcaaggaaatgaaaataggcataccgccatgatctacaaatcagcaaaggagcaatcactatccagaatcccacaataaatccaattgtcatactgacaaaaaaccaattcactccatgcccatcacttccttcataactatgggttttcccattggagctgcagtttatgggcagtggtggaccacatagattgttgccgatgaagctggaggcatcaaaggtttgcaattgagttcctgttggaatttttcccttcaaatgattgtaagacaagtctagcatgctcagaaagctcaaatttgcaatgcttggagggatttcacgagaaagttgattcctggaaaaatcaatggactgtaatgatctcatattacctataccttgtggaatatgaccaatcaattggttgtgggacatgtttaaaaaattcaatccatttagatatgtgatttctcttggtatttcccctaataacttgttacttgacagatcaatgcttgttaccaaacccagaatgtttctgtactcatctcctcttcctttcagccatagtagcacactaactatacttcgcatggaagagtaatacctaccatattgttgtgcttgagaatagatacgaggatctgtactttggttctttagtgtcatggcactcaagttactgaaacagctcggtatattgccagacagattgttttgtgcaaggtctaaaacctgaagatcactcatctgacatatttcatttggaatgtggccggcaaaactgtttgatcgaaggcggaggattttcacatttaagaggttttctccaacccatgttggaatagttcctgaaagattattttccccaaggtccaaggatatcaattggttattcttcttcaaactggttggaaatattccagagagtgtgttgttacgaatttgtaaagactgcagctctgccaaggaacccatggattggggtaagttcccaacaaaatggttgctttgtaaatttacatccaccagaagtgtccaattcatccagcaatcaggtatctctcctgacaaactatttgatgcaagattcagaaattgtaattgcattggcttgtcctgattgttacataaaaaatcttgcatggattcagagaatgaattgcttgaaagatctaactgaaacacatcacttgaaagatagggtaatttaccacacaagtgatttgagcttagatcaatagttgggatagatattggattctttaatgtagtcccaatctcaccatggatatgattacgtgagaggtttaaatacgaaacctgagaaagtgcttcccacatctgtgtgggaatagaaccgaaaatccccgtgttagatagtccaacatattcaagttggttttgtgactgaatccacaatggaaagctgggacctaactgccatgatgtcacttccaaataggtaagttgaaaattaggaatccaattgggacccacttttaaagtgaaattgttccccgatgcaccaaactccgtcaagcttgtaagatttgcaagatcatcttccttgacaactccgtgaaaaagattgccgtcaatatcaagagataacaatttagagagtgatccaagactttcaaatggatttccactgattttattcatagagagatcgagatatcttaatgatgaaagttttccaaatgatctaggaagagcaccaccaattgagttgtaggaaaaatctagcagctcaatatttttaaatgccccaatatgatctgtcagattgcctgaaagtcgtgaactctgaactgcaagtcttgtgagtccatgggaaatacaaggagcaagaatttctaaaagttcattaacctgttggttgagtttgagatatgataaatctatcacccttaagttgcagagattacccaaagaagttggaatgtttccttcaagttgactatatgacaaatcaagttcaacaagagaagtcaaatcacccaaagaagttggaatgtttccttcaagttgagtacctgataaatcaagttcaacaagagaagtcaaatttcccaaggcatcagaaatagtcccatgcaagttgctggatcttaggtccaaagacttgagacgatgaagaccgtataagcaatcaggtatagaagatgagaatgaattgaaagacaagtcaagattttgaagaagtgtgaggtttcgaataccacaaggaatcggaccttggatttcattaccatgtaattgaagagaaacaagtttcttcaatttgaatatccacttggggacaaaagagatggcaggggaataactagtgtaggaaagatggagagtttgcagagatgagaagttgagcaaggatggttcattatagtgagggagtgtgcagtctaacaaatataggtgggtcaaagaaggaagagattggagagtgtgtagccaatgaaatgctttggataggtttgcattagtcaaataaagatattcaagcttccacatacttgatagccattctacattttcgacaacagaatgacctccaaggccaagatacaccaaattggagagattcccaatctgagatggaattgttccattggcggcatacgtcaggtcaagatacaccaaattggagagattccaaatctgagatggaatcttccccatgaatccagtaccagaaaggtcgaggtgagtcaaggaagtgattgtccagaggaaagaaggaattgccataccttcaaaatcattgccgctcaagtcaagatatcgaagcttagagagattcccgatctgagagggtactgttccgttggcaacatctgaactcaggtcaagatacaccaaatttgagagattcccaatctgaggaggaatcttcccatagaatccagtagcagagaggttaaggtgagtcaaggaagtcattgtcccaaggaaagaaggaattgacataccttctccaaggaatacattgccgctcaagtccaagtaattcaaatgctttaaatcagccaaacaaggacttatctctccaccaaagctccatctcctataagcttcccaatcatcattgaaaagagaatctgaagagttgaggtgaagctgaagaagatgggaagtgacgttgtggcagaggactccataccagtggcaacagttggtattattatgattccaagaccaaagcctattcgaaggatcattcagattattcttaaacttcaaaagtgtctcacgctcacttgggatgcacacactctctctgcatgggaagctgaacaaccaaagctggacaaagacaagaatataaatggaggaggaattcatgatcatgcaacgcaaatatagaaaacgagtgtttttgttttagagctaagacaagtgtagttgttggttctgcatataaatcatcaaacttctattatttatactgctgccctgcctgtttttttcttcactttcattattttttaccttttttaatattgtgccaaatactaaaatatttttccattctttttttatgctggcctctttaaattatcgatttaattatccaattctcccgaattaattcttagaatacgaaattttttgtatttattgtatctatctccctttttaaaattcctatatacactaaattcataaaaaaatcaaaattaataacaaagaaatatgatttattcttgtgctgaatattaacgtaaaaaacattctttttggtacagtttttttttacaaaaataaataagaatcattttattttaatttaccctataatactgcttaaatgaaaatttggtgttattaaacttcaaattttaactattatttaatcaatcctttcgttaaacttttgttacgtacaaaagtccaatatttttttaagaaaaaatcaagtcttctatttcatcaaatcccaaccaatgattaatattaaattatcaaattttcaatattcaaactaaaaataatgaaaaaaaattgtcttctaaatcatagctcacaccatcaagtcaatcccaaggttttccattttttcatcttgaacctttggacactccacaaagtccagccatgatgttaaggtctgacttcttcaacttgaaccatagatcactgcattaccttcatatcaagttccctgtcattgacaacaaatgttgcgagttaagtcaagcaaggaaaaaaaatataattgatgaataaatcaattataggaaaagagtttactttaaagactattttggttaaaaaaattatttcgttccaagctagctatttaattttgatcaatttttcaattcacaaaataatattcttcttatatgtgaaaaagactaattaatctttattgtcattaatgattgttgtgttgtctatttctaattttttttaatcataatattattttattttttattaaaaactaattaatgagatacaaagaagtttaaattgcttgtttaacttggtcaatcataattattgagattataatttttccttttataagttttggtccaaatttttccatgatcatatttaacttaaaaagtaaattagaagatctagaaagaagtgtggcatgttttttaaattataaaattatggtcctagctatttattgttagaccacaagtcttcatatattaaagtttttgtctaaatttcatttatggtgatagtttaagaatagtgatagaagagaaaaataaatatacaatttattgaaatatctaactcaattaattgaggaatacatcaattataggaaaagggtgtgctttaaagactatttctattaaaaaatctataaaaaaattatttcgttccaatctaattatttaattttaatcaatttttcagttcacaaaataatattctcttatataggaaaaaaagactagatttaattatcatcaattggaaaagttattgtgtcatgtatttctaattgtattcgaacttgaatattattttatttatcatataaaaattaattatttatataaaagacataaaaagaatattaactttttttctcaaaaaaaaatcagtatcatattttatgttttttacaagttatcaacttaaataagaggagaaacataattttaatttccattttactttttaaataattgcaagtgtcaaatttaaataatcatgagaatactcatgtttaatataatattctaaaaaaaatccatacgataacctaaacaatctacaaagaaatataatttattcttgtgccaaatgctaaaacaagaaacatttttttattttagtttaccgtatagaattgcttaaatcaatgaaatttttattttaagaaaatattaatgatttttacatcaaaggtaattaaatttggcttaattaatcttcaaattttaactattattcaaatcaatcctttcgttaaacctgtacatgttaagtaaacaacaaaaagtcttgccttataaaattcaaacattttattacatgtggtttgaacccataattaattttaaactatcaaattttaattattcaaaataaaagaagtgaaaacaaaattgtctcctagacaaaccgctgaccacctgattgttgccatttatttcttttactcttttttttggttcttttattttgtccaactttaactttaactttaattagtgaggctcacgcggatttgtgctttttaaactttcttttcattttaccttactttctgtgtaacaaccaagaggaaacattcaacacgcaaagatgaattcaaaattcaacacggattcaaattatttaaagaccactgtgcaagaagaaacattcaacaggcaaagatgaatacaaaatttcatttttaaagatcactctgtaaaagagacgacgtctaaggtggatcattgttggaaacaaatttggcagctgtttttttattatcttgtacaatccccagcgttttctctgaaaactaaaccttggccaattctgaacaaatgaattatgatcggtttggttttgtatattttttttcatctcaaactatttttttttatgagaactaaataagaattaaataaataattaaacaaattcaaaatgtcacattttctagactcttcccactactcaaatctcacattaattaaatcattcatttctaaactcactactatcctaaagtagtaaagtccctctcatccttcataattccctttaaatctattgagtaaagatagagacagaataaagaataattcgaataaagacagtaatggccgatggcgtgccgttttgtgcattatatgatgtggtccacaatttgaaacatatataaattatattatatatgtctaatttatattatggaaaatcataataaaggtctaattatattattgaaaatactatttttacatttcacaagataaatgtcttatttattatgtctaatataaattatactagataaatgtctaatttatattattgaagttcaatgaataaatatttttgcatatataaaattatatcttggattttataacaaacaatttaaattgtgaaaataaattacccttcaccagcagcaaggtcgaagcagcttttgtagcactgagggaagcaaaggttttgtgtgaaaccactttccataagagaattgatgagattccaaaggattttctgtccaaccaacaagccttgatgcatttctcactttcagtatgccccttaatttgtttttcagccgaagtcctgcacgtgtaagcttcttcccctgttctcttcacatgctaagaacatatttttaaagggaaattcttgttgttaagaatttgtacgtgcatgcaacacttttgaactccgtcaaagattttttttttttaaattaacatttccaccaataatatgcaaacacgtttgtcttgggttggtgcaaaaaattctcgtgctctatagaaatttgaaatatggatctacgtttaacttccttgaatgaaagaaatatgtaaagggtacgatgtaaaatttacccacggacttaacttaaatgtggttgtaattaattatttttttagagaaaaatgattatgtaaaaaaatttacacaattatttaagtacaatttattatatataatacattttttattaattattttaaaataattcagatcatgatttatgattaaatgattatataaaattattttatatggttagtatattgacattaaactttttatttttaaatgataaaacttaaatataatatttaagatattttgacagtgttctttagtcaaaattagaatttaatcttggtaatctttataataagtattttcattaaatatcaagatattttattgaggtataactccaatctactactgatgagaaaacaaaactatatataattccaatcccatttttaatcaattaggagttacatccctttaaaaaatccagacttttcaatgactaacaccctttttctatgcaatatacaaggatcaagtttgaatgtacaatcttgggatggaaatcaaattcgtatttggttgacgatatttaaaaagtagtcattcttttcttacagctttctgtcagaaaattgtaaattaaatcaaacatggatagaatatgctggaagccgtaaatgagtatttaattaagaagttgattggctttaaaaacttacaagagttccttattatataaaacttgaaaaagcaaaacgaataatacttaaaagttacacctattatttgccctttttatagttatggtaatttagaatattactccaacaattttgttggttctcaagcttgggagtttggaagtttggtnnnnnnnnnnnnnnnnnnnnnnnnnnnnnnnnnnnnnnnnnnnnnnnnnnnnnnnnnnnnnnnnnnnnnnnnnnnnnnnnnnnnnnnnnnnnnnnnnnnnnnnnnnnnnnnnnnnnnnnnnnnnnnnnnnnnnnnnnnnnnnnnnnnnnnnnnnnnnnnnnnnnnnnnnnnnnnnnnnnnnnnnnnnnnnnnnnnnnnnnnnnnnnnnnnnnnnnnnnnnnnnnnnnnnnnnnnnnnnnnnnnnnnnnnnnnnnnnnnnnnnnnnnnnnnnnnnnnnnnnnnnnnnnnnnnnnnnnnnnnnnnnnnnnnnnnnnnnnnnnnnnnnnnnnnnnnnnnnnnnnnnnnnnnnnnnnnnnnnnnnnnnnnnnnnnnnnnnnnnnnnnnnnnnnnnnnnnnnnnnnnnnnnnnnnnnnnnnnnnnnnnnnnnnnnnnnnnnnnnnnnnnnnnnnnnnaaaaagtcggaattgttccttcaagttgattacgtgataaatcaagttcaacaagagaagtcaaatttcccaaagaagttggaatggttccttcaagttgattatatgacaaatcaagttcaacaagagaagtcaaatttcccagggcatcagaaatagtcccatgcaagttgctggaacttaggtccaaagacttgagacgatgaaaaccgtataagcaatcaggtatagaagatgagaatgaattgaaagacaagtcaagattttgaagaagtgtgaggtttcggataccaccaggaatcgggattttattaccccgtaattgaagagaaacaagtttcttcaatttgaatatccacttggggacaaaagaaatggcaggggaataactagtaccggaaagatcaagagtttgcaaagatgagaagttgagcaaggatggttcattatagtgagggagtgtgcagtctgacaaatataggtgggtcaaagaaggaagagattggagagtgtgtagccaatgaaatgctttggataggtttgcattactcaaatcaagatattcaagcttccacatacttgatagccattctacattttcagcaaacagaggttcgacaacagaatcacctccaaggccaagatacaccaaattggagagattcccaatctgagatggaattgttccattggcggcatacatcaggtcaagatacaccaaattggagagattccaaatctgagatggaatcttccccatgaatccagtaccagagaggtcgaggtgagtcaaggaagtgattgtcccgaggaaagaaggaattgacatacctcctccaagtaaaaaattggcgctcaagtcaagatatcgaagcttagagagattcccgatctgagagggtactgttccgttggcaacaacataactcaggtcaagatacaccaaatttgagagattcccaatctgaggaggaatcttcccatggaatccagtataagagaggtctaggtgagtcaaggaggtcattgtcccaaggaaagaaggaattgacataccttctccaagaaatgtattgccgctcaagtccaagtaattcaaatgctttaaatcagccaaacaaggacttatctctccaccaaagctccatctcctataagcttcctcatcgaagagatactggtaatcatagtcatgatagaaagcagaaggtgaagtgtggaggtgaagctgaagaagatgggaagtgacgttgtggcagaggactccataccagtggcaacagttggtattattatgattccaagaccaaagcctattggaaggatctatgagattattcttaaacttgaaaagtgtctcacgctcacttgggatgcacacactctctctgcatggtaagctcaacaaccaaagctggacaaagacaagaatataaatggaggaggaattcatgatcacacaagaatatatagaaaacaagtgtagttgttggttctgcatataaatcatcaaacttctattatttatactgctgccctgcctgtttttttctccactttcattattttttaccttttttattattgtgccaaatactaaaatattcttccattcttttttttacgctggcctctttaaattatcgatttaattatccaattctcccgaattaattcttagaatacgaaattttttgtatttactgtatctatctccctttttaaaattcctatatacattaaattcataaaaaaaatcaaaattaaaaacaaagaaatatgatttattcttgtgctgaatactaacataagaaacattcttttaggtacagttttttttacaaaaataaataagaattattttattttaatttactctataatactgcttaaatgaaaatttggtgtcattaaacttcaaattttaactattatttactcaatccttctgttaaacttttgttacgtacaaaagtccaacatttttttaagaaaaaaatcaagtcttttatttcatcaaatttaatattaaattatcaaattttcaatattcaaactaaaaataatgtaaaagaaaattgtcttctaaatcatagcttacaccatcaagtcaatctcaaggttttccattttttcatcttgaacctttggacactccacaaagtccagccatgatgttaaggtctgacttcttcaacttgaaccataggtcactgcattaccttcatatcaaattccctgtcattgacaacaaatgttgcgagttaagtcaagcaaggaaaaaaaaaatattattgatgaataaatcaattataggaaaagagtttactttaaagactattttggttaaaaaaatctataaaaaaaattatttcattccaagctagctatttaattttgatcaatttttcaattcacaaaataatattcttcttatatgtgaaaaagactaattaatcttcattgtcattaatgattgttgtgttgtttatttctaattgtttttttaatcataatattattttctttttattaaaaattaattagtgagatacaaagaagtttaacttgatctatcataattattgagatcatagtttttccttttataagtcttggtccaaatttctctatgtattgtagatcatatttaacttaaaaagtaaattagaagatctacaaagaagtgtgacatgttttttaaattataaaattatggtcctagctatttattgttagaccacaagttttcatatattaaagtttttgtctaaatttcatttatggtgatagtttaagaatagtgatagaagagaaaaataaatattcaatttattgaaatatgtaactcaattaattgatgaatacatcaattataggaaaagggtgtactttaaagactatttctattaaaaaaatctataaaaaaattatttccttccaatctaattatttaattttaatcaatttttcagttcacaaaataatattctcttatataggaaaaaaagactagatttaattatcaattggaaaagtaattgtgtcatgtatttataattgtattctaacttgaatattattttatttatcatataaaaattaattagttatataaaagaagtaaaaagaatattaactttttttctcaaaaaaaagtcagtatcatattttatattttttacaagttatcaacttaagtaagaggagaaatataattttaatttccattttactttttaaataattacaagtgccaaatttaaataatcatgagaatactcacgttcaatataatattctcaaaaaaaattcatacgataacttaaacaatctataaagaaatataatttattcttgtgccaaatactaaaacaagaaacattttttattttagtttaccgtatagaattgcttaaatgaatgaaatttttattttaagaaaatattaatgatttttttaaaactttaagtagtttacatcaaagataattaaatttggcttaattagtcttcaaattttaagtattattcaaatcaatcctttcgttaaacctgtacgtgttaagtaaacaacaaaaagtcttgtcttataaaattcaaacattctattacatgcggtttgaacccataattaattttaaactatcaaattttaattattcaaaataaaagaaatgaaaacaaaattgtctcctagagaaaccgctggccactcaacaaattcatatcaaggtccccacttttccaacttgaaccatagactactccatcaagtctatgtcaaggtcctccattttaaggtccccacttttccaacttgaaccatagactacttcaaccttaggacactccacaaagtccacccttattaaggtctctgacttcttcaacttctgcaacgcatatatagaaaacaacttaattgtataagtgcttcttgcttctgcatataaatcataaaacttctattatttatactgctgcaagtgtctttcttttcttttttcttttttttatgacgtttcctttttttaattattgactttattatccaattctcccgagttaattcttagaataggaaataattttgaatttactttatctatctcccttttaaaaattcctatatacacaaaattttatattgaatttaactattatttaatctatcctttcattaaatttttgttaattaaacaataaaagtccaacattttattaaaaaaattcaagtcttctatttcatggactccatcaagtcttttattaaaagtccaacttttgttaattcaagtcttttacaaaattttgttaattcaacttttgttaattattacaaaatttggtattgaatttaactattatttaattcaagccttttattaaaagttcaacttttgttaatttaaatattattttgttaattaaaccatagccgactccatcaagtctatctcaaggtcctgtattttttcatcttgaacctttggacactccacaaagtccagccatgttatggtctctggcttcaacttgaaccatagcccatagggcacaaacaatatattaatgataaatacatcaattataggaaaagggtctaatttaaagactatttcagtcaaaaaatctatataaaaaaagattatttcattcatatcttgctatttaattttgatcaatttgttaattcacaaaataatattctcttatatatgaaaaaaagactagatttaatcgtcatttgaaatggttgttgtgtgatctatttctaattatattcaaacatgaatattattttctttatcatataaaaattaattagtgatataaaaagaagtgtgcaaaagaatattaannnnnnnnnnnnnnnnnnnnnnnnnnnnnnnnnnnnnnnnnnnnnnnnnnnnnnnnnnnnnnnnnnnnnnnnnnnnnnnnnnnnnnnnnnnnnnnnnnnnnnnnnnnnnnnnnnnnnnnnnnnnnnnnnnnnnnnnnnnnnnnnnnnnnnnnnnnnnnnnnnnnnnnnnnnnnnnnnnnnnnnnnnnnnnnnnnnnnnnnnnnnnnnnnnnnnnnnnnnnnnnnnnnnnnnnnnnnnnnnnnnnnnnnnnnnnnnnnagcagaatgtagaatgtacgtataataaaataatgagaatgccaactactagtacgtagtacttaattaaaacaaaagtatcaaaattagaacgaaaataactttgatgctgttaatacatgagtttaattttgatacactgtaaaattttaaattgttaattaattagaaatcacctaatgatttgtaaaacaattactaaaaaaaagtttcatttgaaacttaaacttagtcttccacccgtctcaagctctccacatgaacactaagctctagataaaaataaataaataaccacgagaaataatatataactctttagtggacaattggtgttcttttgtgcattcagttgaaggaagttcccagaatggtagaaagcaagggacagatgaaacggccacagctaagaatagtgcatcttatatcgggaagagattgttagaaagtttggttgcagttgcagggcttctaatttggctttcatgagcttaactcaaatattacctatatatatatatatatatatatatattaccaatttggcttaactctaatttggctttcacaaaataatattctcttatatatgaaaaaaaaagactaaatttaatagtcatcaattgaaaaggttgtttgtgtcatctatttctaattgtattcaaacctaaatatgatttcctttatcatataaaaattaattattgataaaaaaagaagtggtgaaaaagaatttaacttttttctataaaaaatagtatcatattttgtattttttataagttatcaacttaaataataggagaaacataatttttattttcattttactttttaaataattgtaagtgccaaatttaaacaatcataaaaatactcacgttcaatataatatttaaaaaaatatatttatacgataacataaataatcttctacaaagaaatatattttattcttgtctcaaatactaaaataagaaacattttattttaatttacagtataggatttcttaaatcaatgaaatttttattttaaaaaaatattgataatttttttaaaactttgagtagtttacaacaaaggtaattaaatttggcttaattagtcttaaaattttaactattatttaaatcaactaatcctttcgctaaacctatacgtgttaagtaaataacaaaatgtcttgccttataaaatttaaatattctattacttgcagtttgaacccataattaattttaaaatatcaattttttattattccaaataaaagaaatgaaaacaaaattatctagtctcctagacaaaccacttcccactccaccaaattcatatcaaggaccccacttttcccacttgaaccatagactactccatcaagtccaagtcaatgtccttcattttttcatcttgaaccttaggacactccgcaaagtccagtcaaccatatttaggtctctatcttcttcaacatgaaccatacgtcactacattaccttcatatcaagttccatatcattgacaacaaatgtttagaattaagtaagcaaggaaaaaaattataaatgatgaatacatcaattataggaaaatgatctaatttaaagactatttcggttaaaaaatctatataaaaaaagacttttttatttcaatctaactatttaattttgatctattttttaatttacaaaataatattcttcttatatgtgaaaaaaaactaattttcattgtcattaatcggaaagattgttgtgtcatctatttctaattgtattttagcctgaatattatattctttttcattaaaaattaattagtaagatgcaaagaagtgtaaaatgcttgtttaacttggtctatcataattattgagatcataacttttttcttttataagtcttggtccaaatttctccatatattatagatcatatttagcttaaaaagtaaattagaggatatgatataccaagaagtgtgacatgtttttttaaattatttatctatggccttagctattttattgttagaccacaagtcttcatatattaaagtctttgtctgaatttcatttacttgtgtggtgatattttaagaatagtgatagaagagaaaaataaatatataatttattgaaatatctaacttatgaagatttgcattcttaatgcataagcttttcagtttatatattatcattatttggaaatatttgatgtgttaattgtctatttctaattaatttgaaaatgaatcttaattttttatcataaaaattagtatcatatttttttattttctttacaagttatcaacttaaatactaataggagcaacataattttaatttccattttattttttaaataattttaaatgccaaatttaagcaatcataaaaatactcacgttcaatataatatttttaaaaaataattcatgagatcacttaaataatctacaaagaaatataatttattcttgtgccaaataaacaacaaaaaaagtcttgcattattaaattcaagtcttctattacatgcaatttgaacctataactaattttaaatgatcaaatttttattattcaaaataaaagaaaagaaaaaaaaattgtcttctagacaaaccacagacaactccaccaaatccatatcaaggtccccactttttcaacttgaaccataggccactccatcaaatctatgtcaaagtttcttatcattgacaacaaatgttgagagttaagtcaagcatgaaaaaaaaaagggtaaaatatatcatttctatccctataaaattttaatgtgctacttttttttatcctgagttaagtttggatgatagataattttcatgtattcttagattttggtgtctatccctataaaaaggttcttatatttacaatttttttatcttttggtcctcaaggggaagattcaactcacacataaacatgaacaaaattaataaaaatagggaagcaagctcaggtacaaatgaagtgtaatggaggtatgagacaaagccactacacattccattattcttgagtctgccaccgacctctgcaagcttagcatttgccaattgccatgatgtaatctccttcttgacagtctctcatcaagttggagtggtatcacagcattgaactaacttgatcgttccaatgggatgatggttttgattgctgcagataaagtgtgtcattgtgagtttctggtcccatgagttaaactacaacgactaaaaaaaatattgtcgtaactttaatggccaaaaggataattaaaccttttatttttttattactttttttaacaacgggttatatatatgtagcagtttattctaaacaatggactacgtgtgaaatctttgaattctatgtaagaaatgttatttcaaacttctcatcagtcttcatgtcaatgatgatatgctccagtttcaaccctttgaattctatgtctaattaagctctcggtcttccgtttttgcaactttatttcgtagaaagaagccaaatttgaagatacaacatttgatactataactgtttggtgttttgaaaatctcactcacatatttccaaatgttacaaaagaatttgattcagtgggttttacgaattccttcctagccttttttaccaaatcagggaatttgcattgttgtgcatgatggctgccacaaggaccattgtaccaacccattagtgcaagtggttttttcttatgagaattgagaaacaaattatatatgtgttttataaagggaattctattatttttaattttgaacttgtaatgttttttgtttccctcacagaacaagtgatgtgactcttgatcgacgccatacgtacgcatactttgatgctcttttttcacaccacttttatcttaatggtatctcaagttgacaatcataaattaaaatagctaactatagttgattagtagagacaaacagctcaaagataaagatctttaagccatcattttttttttccttttcttttctatgaactgtcgtttcttatctctacatggaatagttgaaaattacttgagctttctttacctactgctttccattttggcgaactgcttttctttctgataatgaactttccacttccaatgatggttgaacattaataattcttcatctattttgtctaaaaatttccactcactttttgttagtggtgttaatgtcatgcagacaaatgatgtccaagctccactttttccattcattgcaagttgtaagaagaatgtagaatgtacgtataataaaataattagaatggctacttaattagaacaaaagtatcaaaattaaaacgaaaataactttgatgctgttaatatatgagtttaattttgatagatagtgtaaaaatttaaattgttaattaattagaaatcaccaaatgatttgtaaaacaattagtaaaaaagttataggaaatatatataattaattaattgcaaatgaaagtgtatttaaattaaattcttaattaacatatccttattgtgatattttgtatattttttatttaattgagacagtggaatgagatcgcactacaattttcatcacgggtcaggaattttggaatgttagttggttttagactatataatagggaatgttagtctaatataatagggatggttggtcaggaattttggaatgttagttggttttagactatatatcctcttattcagttttcaaattctcattagagttaagttgcttttggggaagaaccaatgtcttgaaattccctcttcaccagaagcagttttattgtgtctttatcgaagtcatcttctccagagacttgcctttaactttgaagataggaaatagatcagtcaaacattgtttcagtttatttggattttttttaaggacatgtgattttcaaagacttcttacaactcacaacttttggaatttctctatgcctggttaacccacaatttcggcgcctgttgcggttaggaacataggctagtaaaaacactaatcatttcaagagaaatgttaacacacttttctaatatattattttttattttaaaatttattaaaataaaaaattcagctgatctcatattttatttagcaaatttttctaatatattaagtcttaggtttttaaaattataaagctaaaactaaaatgttttactaaatgtattttaaagtaaattttatacacaaaaatattatgattttataaaaattgtttggtcaagggagacatattgagccctcctaactataagctaccctcagggtttctatcttttttattcccacttaatttttacaataaacttaaatgtctaaatatcataactcaaccatgcgacgaaatgacaatgtgttaattttgttgtgtcctcaaccatgcgtatgcctcaggccgagggaattctcacacaccactcctaacaatttctaaggaattccacaacgtgtctatgcttcagacaacaataacgtaccaaataaacaagtagtatctaataacgttaaaataagcacacagatatatcgagccaaccaacgttggaggtagaagaacaacaataatatcaatatttaatttcatttagtgttaatttattcggaactcaacgtaaaataacaatttaatagaaaacaaacagagtatttattaagaataaaaatatatttaatttcatttagtgtttaatagtgttttggtctatgtttttttttttgtttttttatagttatttcttttcaaatttgatgacaacattgtcattgggtccttctacccttcacatcagcaaattggacactaaagagactcggtcagaaacaaataactactaggggtacaataacatgagaggatttaacacttttggagtaggaaaatgtactttaagaaaagaaaattatatgtttatccatgaacactaagctctagacaaaaaaaaaaccacgagaaatagtatataactctttagtggacaattggtgttgtacaaaattgaaatgatccagactaagtcaacaaactggtcttcttcattgaactcacagtgaaaccacagaatttattttcatctactagtttccttcccaattcccatgttttctaaaacataacacactacagaaccttctaataaattaaaacaaaaaaaccaatattttacatgtagcaccacaacctaacaatttctacctacaactttttctatagactataatataatctatctccactcattcattcatcaagattgagaaatggattcaaatgcttgtctaccacacttgctagtgttagcaataacattggtattggttagtcatgcaatgggagattcagctcaagacaaacagagatgtgcagaatccctgacaggtgttgcaacgtgtctgccatatttgggtgctgacacgaaagcacccacagcagattgttgcagtcgtctcacacaagccatgaagaccaacaagaagtgtgtctgccttattctcaaagacagggatgatcctgaccttggcttaaagattaacatgacaatttctgttggtctcccttctctttgcaaaacacctgataatctctcacagtgttctggtacgttcaatttctaattaagccttcctttttcttaaagaacactacactacagtgttatgtttccattttctatgcaatgaatgatctatcagtcttgttagttgtcatataacaacttatgtttttacattcagttgaaggaagttcccataaggaacagatgaaacggcctcagctaagaatagtgaatcttatatcgggaagagattgttagaaagtttggttgcagttgcagggcttctaatttggctttcatgagcttaactcaaatactacctatatattaccattttcatatcatgttgaaatgtaaacctttgattagttgatagtgtaaaaaatatttacactcttgagtgtactaaatctctgacagactcacaatagatattattgcaaaaccttttggagatttattttttgtttttaatactaacctagagtctacagatcaaagttaattaattgctgaaaattatgttcattctcattcttggcgctgttagtccagtgtgaaaacggacaaattcagtttcatgttatatatggctctgtatatgaaaaggaaattaaagaaaaagtagaatttgattatggctaatttcacccattatatttattacaagaaaacctttagataaaaattattttttggtacttttagcttggtcgtaaacattaacattacatcacgcacacaaacataaaaggcaaaccaaattattttacatccctaaattttatgaggaaggatgctataaatattaacaatacatctcacacacacaaagacaactaaaattatatcactaaattgaggtggggatagttttgaaaaaaaaaatagtaggtgtggttgtgtaggtgtgtttttatgtttttcaattcaggatattaaatttacaaataattttatgcttttcaattatattttaacaataattaagaaataaatctaaatcattctacatttgtttataggtacttggcatattggagatgctatatgggaatctaaattttgcttaacacaaatgtggtatatgcaaggaaaaatcaaattgaaaattttttaaccaccacttcaaattttaaaagattcgtttcaatataaggatatgaagaacaaattgtttttacagaacattccctccatgatgttttcctttcctttaggtgaaaaaaatagacatttccaaaaataatggaagtgaaccttatataatgctgtttatatagagaagtctttcaaaatacaatttaaagtactattactacaaactaatcaagtctctcaaattttgcgtcgtcttgtggcagaacacattgtctctcaaatttgagcaactgatcaagtcctacttttgaagcctccatacctggccatacatagttggagtccacacaccataaatttcaacaataatttggcaacttggcatttaagaggagggtaattctgcaaatggtctttcatattcaggatacaatagattgtagttttcaatgattcacgtgaaatgttcacaatgtaatgttttcaatgttttataggtcttaaataccaatagcagacaagatcatgcttatgcttttttgctatcgtgctcctgttccttgccactggtcttgatgaagccaagcattgtctctttgccttttaagttgtacatagttgcaaaacaggtacatgtgaaagaataatgcttattaaaaggtaaggttgattttaaagtgggcatgcaagaatgcattcattatctcaagtaaataaattcaagcgaatatgtgatttggattagagaatagtattatccagtgcacactaaattggagagattcccaacatgtggtttcaaaactaaaagaacttaccaactatttgaattttaatctacgtgatctagctaatgttttctatcagagaattacaactagttgatcttaagtacaaaactatactaaatatgcaaatctttacatcnnnnnnnnnnnnnnnnnnnnnnnnnnnnnnnnnnnnnnnnnnnnnnnnnnnnnnnnnnnnnnnnnnnnnnnnnnnnnnnnnnnnnnnnnnnnnnnnnnnntaaggctctcaaatttgaagaaaaaaaagaagatagcaatgactacaaattgatcaacctgccaatacaattataaaacatcggtgtattctaagcaacactaaacagtgatactacctgagcgaaaagattgaagttgaaccacacatgatcaaggaaatgaaaataggcataccgccatgatctacaaatcagcaaaggagcaatcactatccagaatcccacaataaatccaattgtcatactgacaaaaaaccaattcactccatgcccatgacttccttcataactatgggtgttcccattggagctgcagtttatgggcagtggtggaccacatagattgttgccgatgaagctggaggcatcaaaggtttgcaattgagttcctgttggaatatttcccttcaaatgattgtaagacaagtctagcatgctcagaaagctcaaatttgcaatgcttggagggatttcaccaaaaagttgattcctcgaaaaatcaatggactgtaatgatctcatattacctataccttgtggaatatgaccaatcaattggttgtgggacatgtttaaaaaattcaatccatttagatatgtgatttctcttggtatttcccctaataacttgttacttgacagatcaatgcttgttaccaaacccagaaagtttctgtactcatctcctcttcctttcagccatagtagcacactaactatacctgataccgaagagaattgtttattatctggtgccgtagaatagatacggggatctgtactccggttcactagtgtcatggcactcaagttacggaaacagctgggtatattgccagacaaattattttttgcaaggtctaaaacctgaagaagactcatctgacatatttcatttggaatgtgaccggaaaaactgtttgatcgaaggcggaggattttcatatttgagagcttttctccaacccacggtggaatagttcctgaaagattattttctccaagatccaaggatcaattggctagtcttcttcaaactggtaggaaatattcctgagagtgtgttgttacgaatttgtaaagactgcaagtctgccaaggaacccatggattggggtaagttcccaacaaaatggttgctttgtaatttcacatccacaagaaatgtccaattcatccagcaatcaggtatttctcctgacaaattatttgatgcaagattcataaattctaatttcattggcttgtcctgatcgttacataaaaaatcattcatggattcagagaatgaattgcttgaaagatctaaccgaagcatataacttgaaagatagggtaatttaccacataagtgatttgtgcttagatcaacagtttgcatagatattggattttttaatgtagtcacaagctcaccatggatatgattatgagagaggtttaaatagataacctgagaaagtgcttcccacatctgtgttggaatagaatctaaaatccccgtgttagacagtccaacatattgaagtttgttttgtgacagaatccacgatggaaagttgggacctatctgccatgatgtcacatccaaatagataagttgaaaattaggaatccaattaggacccacttttaaagtgaaattgttccctgatgcatcaaactccttcaaacttgtaagatttgcaagatcatcttcgttgacaactccttgaaaattattgccatcaataagaagcgttgacaatttagagagtgatccaagactttcaaatggatttccgctgaatttattaatagagagatagagatattttaaatctatctcccttaagttgcggagattacccaaaaaagtcggaattgttccttcaagttgattacgtgataaatcaagttcaacaagagaagtcaaatttcccaaagaagttggaatggttccttcaagttgattagatgacaaatgaagttcgacaagagaagtcaaatttcccagggcatcagaaatagtcccatgcaagttgttgagccttaggtccaggaacttgagtcgatgaagaccgtataagcaattaggtatagaagatgaaaatgaattttcagacaagtcaagattttgaagaagtgagaggtttcgaataccaccaggaatcggaccttggatttcattaccctgtaattgaagagaaacaagtttcttcaatttgaatatccacttggggacaaaagaaatggcaggggaataactggtattgtaaagatggagagtttgcagagatgagaagttgagcaaggatggttcattatagtgagggagtgtgcattctgaaaaatataggtgggtcaaagaaggaagagattggagagtgtgtagccaatgaaatgctttggataggtttgcataactcaaatcaagatattcaagcttccacatacttgatacccattctacattttcaacaaacagaggttcaagactagaatgacctccaaggccgagatagagcaaattggagagattcccaatctgagatggaatcttccccatgaatccagtataagagaggtcgagctgagtcaaggagctcattgtcccaaggaaagaaggaattgccataccttctccaaggaaataattgtcgctcaagtcaagatatcgaagcttagagagattcccgatctgagagggtactcttccgttggcaacttctctcaggtcaagatacaccaaatttgagagattcccaatctgaggaggaatcttcccatagaatccactatcagagaggtcgaggtgagtcaaggaagtcattgtcccaaggaaagaaggaattgccgtaccaaggaattcattggcgctcaagtccaagtaattcagatgctttaaatcagccaaacaaggacttatctctccaccaaagctccatcttctataagcttcccaattgtagtcatcatagaaagcagaatcataagtgtggaggtgaagctgaagaacatgggaagtaaggttgtggcagaggactccataccagtggcaacagttggtattattatgattccaagaccaaagcttatttgaaggatctatgagattattcttaaacttcaaaagtgtctcacgctcacttgggatgcacacactctctctgcatggtaagctgaacaaccaaagctggacaaagacaagaatataaatggaggaggaattcatgatcacacaaggatatatgaaacagcttaattgtataagtgcttcttgctcctgcatattaaacttacttctttctattatttatactgctgccctgcctgtttaaaaaaattattctatttcatgatatcccaacccataattaatattaaattattaaatttttaatattcaaactaaaaataatgtaaaagaaaattgtcttctaattaccatagcccacaccatcaggtccatctcaaggttttccatattttcatcttgaacctttgaacactccacaaagtccagccatgttatggtctgacttcttcaacttgaaccataggacacagcattaccttcatatcaagttccctgtcagacaacaaatgttgccagttaagttaagcaaggaaaaaaaatataattgatgaatacatcaattataggaaaagggtgtactttaaagactatttctattaaaaaatctataaaaaaaattatttcattccattctaattatttaattttaatcaatttttcagttcacaaaataatattctcttatataggaagaaaagactagatttaattatcatcaattggaaaagttattgtgtcatgtatttctaattgtatttgaacttgaatattattttatttatcatataaaaattaattagttatataaaaagaagtaaaaagaatattaactttttttctaaaaaaaaatcagtatcatattttatattttttacaagttatcaacttaaataagaggagaaacataattttcattttcatttaactttttaaattgccaaatttaaacgatcatgagaatactcacgtacaatataatattctcaaaaaaaaatccataggataacttaaacaatctacaaagaaatataatttattcttgtgccaaatactaaaacaagaaacattttttattttagtttaccgtatagaattacttaaatcaatgaaatttttattttaagaaaatattaatgatttttttaaactttaagtagtttacatcaaaggtaattaaatttggcttaattagtcttcaaattttaactattattcaaatcaatcctttcgttaaaccttgtatgtgttaactaaacaacaaaaagtcttgccttataaaattcaagtattctattacatgcggtttgaacccataattaattttaaactatcaaattttaattattcaaaataaaagaaatgaaaacaaaattgtctcccaagcaaatcgcctgccactccaccaaatccatatcatagtccccactttttcaacttgaaccatagactactccatcaagtcatgtcaaggtcctccattttttcatcttgaaccttaggacactccacaaagtccacccatattaaggtctctgacttctgcaacgcatatatggaaaacaacttaattgtataagtgcttcttgcatataaatcataaaacttctattatttatactgctgcaagtgtctttcttttcttttttcttttttcttttttttatgacgtttcctttttttaattattgactttattacccaattctcccgagttaattcttagaataggaaataattttgaatttactttatctatctccctttttaaaattcctatatacacaaaattttgtattgaatttaactattatttaatcaatcctttcgttaaacttttgttaattaaacaataaaagtccaacattttattaaaaaaattcaagtcttctatttcatggacttcatcaagtcttttattaaaagtccaacttttgttaattcaagtcttttacaaaattttgttaattcaacttttgttaattattacaaaatttggtattgaatttaactattatttaattcaagtcttttattttgttaattaaaccatagccgactccatcaagtccatctcaagatcctttatttttttatcaagtccatctcaagatcctttatttttttatcttgaacctttggacaatccacaaagtccagccatgttatggtctcaggcttcaacttgaaccataggctgggccacaaacaatatattaatgataaatacatcaattataggaaaagggtctaatttaaagactatttcagtttaaaaatctatataaaaaaatattatttcgttcatatcttgctatttaattttgatcaattttttaattcacaaaataatattctcttatatctgaaaaaagactagatttaatcgtcattaattggaatgattgttgtgtgatctatttctaattgtattcgaacatgaatattattttctttatcatataaaaattaattgatgatataaaaagaagtatgaaaaagaatattaattttttttctaaaaaaaattagtagcatattttgtatttttttacacgtcatcaacttaaataataggagaaacataattttaatttccattttaatttttaaataattttaattgccaaatttaagcaatcataaaattactcatgttcaatataatattctcaaaaaaaatatccttatgataacttaaataatctactaagaaatatgatttattcttatgcagatcgaatactaaaatatgatttagtcttcaaattttaactattatttaaatcaatcatttcgttacacctttattaagtaaatgatagcataacaagcaaggaggtgcaagcagtaacactcacaaagataaagatctttaagccatcatttttttttccttttcttttctatgaactgtcgtttcttatctctacatggaatgtctagaagttgaaaacttgagctttctttaactatactgctttccattttggggaactgcctttctttctcataatgaactttttccacttccaatgatggttgaacattaataattctttatctattttgtctaaaaatttccactcactttttgtgagtggtgtgaatgtcatgcagacaaatgatgtccaagctccactttttccattcattgcaagttgtaagcagaatgtagaatgtacgtataataaaataatgagaatgccatctactagtacgtatcaaaattagaacaaaagtatcaaaattaaaacgaaaataactttgatgctgttaatacatgagtttaattttgatacacagtgtacaaatttaaattgttaattaattagaaatcacctaatgatttgtaaaacaattactaaaaaatgttataggagaatatatataattaattgcaattctaagtgtatttaaattaaattcttaattaacatatccttactgtgattttttgtatattttttatttattgagacagtggaatgagaccgcactataattttcatcacgggtgtggttgtcaaatataatagggatggttgggaagatgttgcaggtgccggtttgttgttgagggaaaatgtactttttgaagaaaataaaattatgttttcaatgatatatattcgactttttgtatttgaactttgacaatttttttcttaaaatctctaatatttaaaaaattattttaaattatcatcgtttgttaaataatgacgtatccgttaaatattcgataacacaaaattgatttatagtacgtcaaaaactgtcaatattcatttgaaacttagtcttccacccgtctcaagctctccacatgaacactaagctctagataaaaataaataaataaccacgagaaataatatataactnnnnnnnnnnnnnnnnnnnnnnnnnnnnnnnnnnnnnnnnnnnnnnnnnnnnnnnnnnnnnnnnnnnnnnnnnnnnnnnnnnnnnnnnnnnnnnnnnnnnnnnnnnnnnnnnnnnnnnnnnnnnnnnnnnnnnnnnnnnnnnnnnnnnnnnnnnnnnnnnnnnnnnnnnnnnnnnnnnnnnnnnnnnnnnnnnnnnnnnnnnnnnnnnnnnnnnnnnnnnnnnnnnnnnnnnnnnnnnnnnnnnnnnnnnnnnnnnnnnnnnnnnnnnnnnnnnnnnnnnnnnnnnnnnnnnnnnnnnnnnnnnnnnnnnnnnnnnnnnnnnnnnnnnnnnnnnnnnnnnnnnnnnnnnnnnnnnnnnnnnnnnnnnnnnnnnnnnnnnnnnnnnnnnnnnnnnnnnnnnnnnnnnnnnnnnnnnnnnnnnnnnnnnnnnnnnnnnnnnnnnnnnnnnnnnnnnnnnnnnnnnnnnnnnnnnnnnnnnnnnnnnnnnnnnnnnnnnnnnnnnnnnnnnnnnnnnnnnnnnnnnnnnnnnnnnnnnnnnnnnnnnnnnnnnnnnnnnnnnnnnnnnnnnnnnnnnnnnnnnnnnnnnnnnnnnnnnnnnnnnnnnnnnnnnnnnnnnnnnnnnnnnnnnnnnnnnnnnnnnnnnnnnnnnnnnnnnnnnnnnnnnnnnnnnnnnnnnnnnnnnnnnnnnnnnnnnnnnnnnnnnnnnnnnnnnnnnnnnnnnnnnnnnnnnnnnnnnnnnnnnnnnnnnnnnnnnnnnnnnnnnnnnnnnnnnnnnnnnnnnnnnnnnnnnnnnnnnnnnnnnnnnnnnnnnnnnnnnnnnnnnnnnnnnnnnnnnnnnnnnnnnnnnnnnnnnnnnnnnnnnnnnnnnnnnnnnnnnnnnnnnnnnnnnnnnnnnnnnnnnnnnnnnnnnnnnnnnnnnnnnnnnnnnnnnnnnnnnnnnnnnnnnnnnnnnnnnnnnnnnnnnnnnnnnnnnnnnnnnnnnnnnnnnnnnnnnnnnnnnnnnnnnnnnnnnnnnnnnnnnnnnnnnnnnnnnnnnnnnnnnnnnnnnnnnnnnnnnnnnnnnnnnnnnnnnnnnnnnnnnnnnnnnnnnnnnnnnnnnnnnnnnnnnnnnnnnnnnnnnnnnnnnnnnnnnnnnnnnnnnnnnnnnnnnnnnnnnnnnnnnnnnnnnnnnnnnnnnnnnnnnnnnnnnnnnnnnnnnnnnnnnnnnnnnnnnnnnnnnnnnnnnnnnnnnnnnnnnnnnnnnnnnnnnnnnnnnnnnnnnnnnnnnnnnnnnnnnnnnnnnnnnnnnnnnnnnnnnnnnnnnnnnnnnnnnnnnnnnnnnnnnnnnnnnnnnnnnnnnnnnnnnnnnnnnnnnntacaagttatcaactgtcccagggcaagacgatgtaaaattgcttaaattaattaaaattttattataagtaaatattaatattttaaaaaaattattagtttacaataaaggtaattaaatttggcttaataattagtcttcaaattttaaccatttaaatcaattctttcgttacacctgtgttaaataaacaacaaaaaaagtcttgcattattaaattcaagtcttctattacatgcaatttgaacctataactaattttaaatgatcaaatttttattattcaaaataaatgaaaagaaaaaaaattgtcttctagacaaaccgcagacaactccaccaaattcatatcaaggtccccactttttcaacttgaaccataggccactccatcaaatctatgccaaagtttcttatcattgacaacaaatgttgagagttaagtcaagcatgaaaaaaatagggtaaaatatatcatttctatccctataaaattttgatgtgctactttttttttatcctgagttaagtttggatgattgataattatcatgtattcttagattttggtgtcattttaggatatttatgtgatatatgtcttttatgcttttttattgtcatgaactaatcttctcttttgttggagttgaatataattggttcatttttcatgtaatgactatttttttattgaataaagcattctaattgtttctcttctatgtttaatatgtgtttttggcttaatcacctgtttgtatgattttttttattcaattgtaattaaaaaatttctttgaactacgaattgcaaaaaacacctaataatttttatgtctaggaataagataaaaagaattgagcatcaacaaacactttatcttaatgaaaaccatttagttatattaatttaagggattgatagtgtaatcaaggattaggtctcttcactaggaattaaagtgaagataatatgatgggtttatgataatataacatttattaaatatgaatgtgtagttattaggtgatagaaacttcaatgaaattaaaccccaacaattttttcattgatttaaccccaacaattacatggggtgcttgttaaaattcccaaacaatttttttccttaattttttcttttattttcttctttagttttcttatttttatttcttcctttaatttctttatctttatgcatattgttatttaaatcaaattagctaatgttaatgaatttcaaatattcatagtatagaaattatactttttattacccaattattgcctaagtcctgttaatgagtattatagaaaaaatgcatcaatactcctcacgaaatgggaatgtggaatgtatcagagtaaggaaaagcgnnnnnnnnnnnnnnnnnnnnnnnnnnnnnnnnnnnnnnnnnnnnnnnnnnnnnnnnnnnnnnnnnnnnnnnnnnnnnnnnnnnnnnnnnnnnnnnnnnnnnnnnnnnnnnnnnnnnnnnnnnnnnnnnnnnnnnnnnnnnnnnnnnnnnnnnnnnnnnnnnnnnnnnnnnnnnnnnnnnnnnnnnnnnnnnnnnnnnnnnnnnnnnnnnnnnnnnnnnnnnnnnnnnnnnnnnnnnnnnnnnnnnncattaagaacatttattaccaatgaaagcaaaacaaacagacaccccatatgaacatgtacatagtatggtaacccttttcacatttttaatgtctagaataacacgttgtaatgtctctcactcctaacagttaacatgtaaactcacaatttcccaagtaaccttcttaccttcaaaactattatcacataaatcagatctctcaagtggtcaagataatgaaaataagcacgcctccaagttctgttgaagaaaacaacactgcaaaaaccccaaaatcctgctgcaaatccaactcccatacccatataaaactctgatgttccaaagaaattaccatcaccgtgtcgaacagaagcactctctgtcaactcttccttgtctgtgcaattttttgttacaggaggaccacaaagcccatgtcaatgaatttcattgtagagcaattttgcagtgttgaaggaatatatccagagaagcggttgtcgtctaacaacaaagactcaagttgagatagataccccatggagtttggaataacaccagacaaattgttactacccaagttcaaatgcaccaatgcttgccaatgcacccaacagtgaccaagatcaccagataagacattatttgaaaaatcaagcacactcaaattattagtagcattttcctttccacataaaaagggagaaattgttccggaaattgagttattggcaacattcagcacttcaacatttgcagacacacttggcaatgtacccttgaacaaattagaactcaaatttatgaggctggaattgagaaagatgttagataggtctccacttaacagattgttggacagatccaggaattcagtttgcaaagtccaattccaaaaccaacttggaaccaagtctgcaatacctgccttagacattgtcaaaaccttcacagaactttgcctttttagccattctggaaacttaggacctattccaaaggagctcagtaaaacatattcaagctgaaaaggaggaacccatccagagttgacactgaggaacaagtttgtccaagacaaacgtagttcctttaatttcaaaagttttacaaaatttgactcttttatagatccttctaacaaattagatgaaaggtctaacatcactaaatttgagagagttccaagagttacaggcatatcaccagtcaaagaattagttccaagatttaatacctgcaggtttctgaggagctcaaaactcttaggaatggttccattcagtcggttgtgagccaggtttaaagttctcaagaatgacaagtttgcaaatggtgagggaattggacaagtaaaggtattattactgagatttagaacttcaagatgcttaagctggcctaatgaatctggaagtggcccactgagctggttgttctgcaggtctagattttttatgttctgaaggcttgatattatttgtggaatttgtccctgtaaaaggttactgtgtaaatcaagttggacaagagaatcattacatttatttatactgattcttataacagaattgctattctatggaatgttcaggattcaagtttgttacaattatctcccacgtgttgtaattgctctaacagaatgcatatatgcctttaataccatcccgcccctttcagatgtaatctttgaggtacgttggtctctctacccttctcttgggcctttgctctttgttttctgaaattgcttgttgcaccttatcctgctggttgttaatctgcattgcttgttgcacctcattctgttgattgtctccctctgctatgtttccccctgtatcacccactgagctggttgttctgcaggtctagattttttatgttctgaaggcttgatattatttgtggaatttgtccctgtaaaaggttactgtgtaaatcaagttggacaagagttgtgctgagattaaatagccatgaagggatttgctgattgagattgttaattgaaagatcaaggacttggagatgtgtgaagttggtttttccttttggtggtcctaagttatcaatttgacagctctccaagtgtagttctgaaagagatggaagtgcactcagtacttgaagccagttaccttgtttatgaaggtctgaaccactcaaatcaaggtactctaaggaagatagccttgatatccaattaaggttatctatctgaagagcataattgtatcccagattaaggtgatgcaggtttgagaggtttcctagttgatgagggattaatcccatgaacccacttaagttaaggtccaagtatctcagactctccaatgagcctaggaagcttggtattggagtaagaacaaaataatttgaactcaagtccaaacgattcaaatattttagttcaagcaaagaaggactaatctctccactcaactccctatagggagagcccgcaggtgtgtagagattgatttccatgactttacctgtgttgttgcagtgaacccctggccatgtacagcaatccgatttgtcagaccacgatgaaaacctgtttgaagggtctgctagtccatgcttgaagctgaggagcgcattcctttccttctcactgcaagtcatattgagccttgctgccttgcttgcactgaagtggagagttgttgcagtggacaatatcaagagaagaacatgagttgcaaatagcactgccatgaagaagaaggaagacgaaaaaggttgaatccacaattttctggttcacggttggtatttactactaacaatgcctatataggatatataccatagaagggtttgcatttaaaattttattccactaatggtggtggttgcaaaatgcacacatatgtagaggtatatatgtctacaaggagacaattaggaataaaagtgtctaaccacaccaccattattttgctctagtttattttattttgatttaattacccttttagtccttatagttgtgataattttttttagtccctatagtttaagacattcattttgattcttatatttacaattttttttatcttttggtcctcgcggggaagattcaactcacacataaacatgaacaaaattaataaaaatagggaagcaagctcaggtacaaatgaagtgtaatggaggtatgagacaaagccactacacattccattattcttgagtctgccaccgacctctgcaagcttagcatttgccaattgccatgatgtaatctcgttcttgacagtctctcatcaagttggagtggtatcacagcattgaactaagttgatcgttccaatgggatgatggttttgattgcagcagataaagtgtgtgattgtgagtttctggtcccatgagttaaactataaggattaaaaaaaatattgtcgtaactttaaggaccaaaaggataattaaaccttttattttttttattattttttttaacaacgggttatatatatgtagcagtttattctaaacaatggactacgtgtgaaatctttgaattctatgtaagaaatgttatttcaaacttctcatcagtcttcatgtcaatgatgacatgctccatttgaattctatgtctaattaagctctcggtcttccgtttttgcaactttatttcgtagaaagaagccaaatttgaagatacaacatttgatactataactgtttggtgttttgaaaatctcactcacatatttccaaatgttacaaaagaatttgattcagtggtttttacgaattccttcctagccttttttaccaagtcagggaatttgcattgttgtgcatgatggctgccacaaggacccttgtaccaacccattagtgcaagtggttttttcttatgagaattgagaaacaaattatatatgtgttttattaagggaattctattatttttaattttgaacttgtaatgttttttgtttccctcacagaacaagtgatgaaactcttgatgatcgacgccatacgtacgcctactttgatgctcttttttcacaccacttttatcttaatggtatctcaagttgacaatcataaattaaaatagctaactatagttgattagtagagacaaacagctcaaagataaagatctttaagccatcattttttttccttttcttttctatgaactgtcatttcttatctctacatggaatgtctagaagttgaaaattacttgagctttctttacctactgctttccattttggcgaactgcttttctttctcataatgaaccttttccacttccaatgatggttgaacattaataattctttatctattttgtctaaaaatttccactcactttttgtgagtggtgtgaatgtcatgcagacaaatgatgtccaagctccactttttccattcattgcaagttgtaagcagaatgtagaatgtacgtataataaaataatgagaatggcaactgctagtactacttaattagaacaaaagtatcaaaattaaaacgaaaataactttgatgctgttaatatatgattttaattttgatagatagtgtaaaaatttaaattgttaattaattagaaatcaccaaatgatttgtaaaacaattactaaaaaagtgataggaaatatatataattaattaattgcaaatgaaagtgtatttaaattaaattcttaattaacatatccttattgtgatattttgtatattttttatttaattgagacagtggaatgagaccgcactataattttcagcacgggtgtggttgtcaaatataatagggatggttggtgaggaattttggaatgttagttggttttagactatatatcctcttattcagttttcacattctcattagagttaagttgcttttggggaagaaccaatgtcttgaaattccctcttcaccagaagcagttttattgtgtctttatcgaagtcatcttctccagagacttgcctttaactttgaagataggaaatagatcagtcaaacattgtttcagtttatttggatttttttttaaggacatgtgatttacaaagacttcttacaactcacaacctttggaattgctctatgcctggttaacccacaatttctggtgcctgttgcggttaggaacataggctagcaaaaacactaatcatttcaagagaaatgttaacacacttttctaatatattattttttatattaaaatttattaaaataaaaaattcagctgatctcatattttatttaacaaatttttctcatatattaagtcttaggtttttaaaatataaagctaaaactaaaatgttttactaaatgtattttaaagtaaattttacacacaaaaatattatgattttataaaaattgtttggtcaagggagacatattgagacctcctaactataagctaccctgagggtttctatcttttttttccccacttaatttttgactttggcagcaagggttaagcctaccacatctacatgactatgtcttactttccaataagttacacctaaatagctaacatattcctcttgctcacgcacactatctttcgtaaacttttcacgatcatctttatattatcaaattcatttaattaaatatacaattatcttaatattataagcaagtctctgtataatcatgtagtgtttctacattgaatgagcctaaatcacacactcctgaaaaaagagtcatattgtcaaaatagccgtaaaaagatagaatgttagggacgctgtgagggagagagagagaaggaagtatttttcttggattcgaggccaagtcctcctgacagactacactattcaggactaaagttctttttcgtaagttttatttacgctgggatacttcttttatacacgggtacgtttcgaccatgaacagctttcctaactaattcacgtgccaatataacagactaactaacttgctgttaatacaacacgtggtcttattatcacacgtgatctataacacgtaatcttctagatgcttcggacgtgtggaactcctttgtcttcgtggtactggttcatcgtggctgctatcttccttagctgggttgctgctgctaacatcatccgaccctgtgaaactcaccttgtcctcaaggtgatgagcatggcaaacctcgtcccacttttcccacgtggagtcttccggaggaagaccaacccattgaacaagaacgaaacgagttggggggtctacagagaagtccattcgagagtcaaggatggctagtggctcaagtatagggtgtggggaggaagtatccgccggaagggaagaggtggggaggtcaagaggtccgtgatgagggcgtagtaaagaacaatggaagacggggtggatacgagacccttcaggtagttgcaaacggtaagcaacgctgccaatgcgttccataatgggaaatgggccgaagtatcgcttcatgagtttatggtgacgctgagaacggagggactgttgacggtgaggtctaagcttaacatagactaactggccgatctcgtactgaacatcgcggcgtttcttgtccgcaaaatgcttcatctcggcttgtgctttgaggaggttgcggcgaagggattcgtgaagctcagctcgtgaatggagaagggtgtcaacggcctcatttcgagaggaccccaagacgtatcccggaatggaaggtgggggtttcccgtaaataactttgtagggagtgaccccagttccggagtgttgcgaggtattgtacgcccattccgcgaggggaagaaacttatgccattcctctgggcgtttgtggacgaaggacctcaggtactgctcgacgctgcgattcatcacctccgtttggccatctgattgagggtggtaggcggtggtcatgcggagggtggtgccactaagcttaaacaactcgcgccaaaaggaactgataaacacgggatcgcgatcataaatgatgctggaagggaaaccgtggagcttacacacgatatccaggaaaagtgtagctactttaaaagccgtgaactgagttggcaaagcaccaagatggaggcctttcgagaacctatcgaggaccaccaaaatgactgtgaagctgtgagagcttgggagatgggtgataaagtccatcgagaggtcttcccagataccagtggggggtgagattggttgaaggagcccagctgacttgcgagtcacgtgcttgacttgttggcagacacggcattcgcggatgaaggacttaacatcagcaatcatggtggtccactggaaattagaacgaagacggtggagggtcttcttgacaccaaagtgacctccgagaggggttgcgtggtactcatgtaataatgcaggaatgaatggattgcgagagtcaatccagatggcattcttgaagaaaatgagctcgttggcgatggtgaagtgggggtgatcctctgggtgagcctgaatagctttcttctatgtctgaaaatcaggactagcgaaaagggcctgttttagttgagtgaggaactcgtggtgggggacagagaggagagggcactgggcttgtccggtgtgatcaatgcgcgagagagagtctgcgacaatattggaggatccagctttatattgtatgtcgtaatcaaacccgagaagctttgccaaataaaactgttgttctggagtttgaatgacctgagacataaggtcatggaggctacggtggtcggtgaagatagtgaacttatggccaagtaagtactgacgccattttcagacggcagccgtgatcgcgtgcagttcgtgtacatacgtggaagcgtgttgcatgcgagggcagaagggtttgctaaaaaacgcgataggatggcgttgttgttgaaggacggcacccatggccgtgccggaagcatctgtttccagggcgaaaggtaaggaaaaatccgggagggcgaggactggggctgccgtcatagcacgtttcaacgcgagaaaggcttcctgtgattctggtacccactggaaagcgtctctacaaagtaggcgagttaagggtgttgcaatcgcggcgtaacctttaacgaattttcggtagaaccttgtgagcccgaggaaggctcggagttctttggctgatcgaggtgcaggccaatcgaggatagcttgtatcttagaagggtcaggttggacgcccttctcggagacgacgtggcccaaatagtctagcttgcgctggccgaagagacacttggaacgcttaagatagtattgggcctgagttaatgaagtgaaaactcgctctaggtgatgaacatgatctgggagagtctcgctgtagatgagaatgtcatcaaagaacaccgttgcaaacttccgcaagtgaggaccaagcacggcgttcattgcggcctggaatgtcgacggcgcgttgcagaggccgaagggcatgaccctatactcaaagtgtccatggtgagttcgaaaagcagttttagaaacgtcttctggggccattaatatttggtgaaacccttgacgtaaatctattttggagaaccaggaagcgcggccaagttcgtcaaggagctcgtctatagttggaagtgggaagcgatctcgcactgtaattgagttaagcgccctgtaatcgacacacatccgccatgtgccgtccttcttcttaaccagtaggacgggggaagagtatggactgcggcttggttggatgaatcctgattcaagcagggctgtgacttgtttttcaatttcggttttctgaaaatgcggatatctatacgggcggacattaatggggctagctgatgggagaaggttaatatggtggtcgtggttacgaggagggggaagggtagaaggttgttggaataaggaactgaaacggagtaagagggcattaattgcagaaatggggtgaggtgggtctggaggtgcttcaatggagttaacgggtagtaaggataagtggaaaagtgcagaggttgactgagtatgtaacatacatctcacctggttagccgagaccgggtcagtatcggactgaacgtcggcgcggagggtgataggctgtccttgatggctgaagtgcatggtgaatgcggaataatccgtaactatcgggcccagggtacgcaaccactcaacacctaacacaatgtcagctccacttaatggtaggacgcgtagtgttatggtgaaggagtgatcttggattagcagcttagtggctgggcaaagttgccggcagtccaaaacggaaccgttgcccaccatcacgcgaaggggagttgtggcttccaatggtaagtttaaaaacttggcaaccctaggttggataaagttgtgggtacccccactatccaccaggattgtaacacgcgcatggttgaccagaccataaaggcggaaggtctccgttgctgggacgccggccatggcatgtaaactgatgtgaggatgaagagatgtggggtcaaaggaaggggaaggctcgttaggtgaatgtgttgtgacttctggtgaggtggtatcggaaaagggagggtcgtcggaggccgtaatgaagaagagaacgcggcccttacaacggtgtgatgagttccatttctcatcacagttgtaacaaagccccttttcacgccgatacgtcatttcttcttgagttcgctggataaaaggtgttttagggcgaggtctagaggtggatggctgagaggatagggttggagttggtgtgtgtggggaagagaacgaaggtcgagaggatctccggcggtcagttatcttatcctcttggagacgtgccaaagcagtagcgtgagggagtgaagcgggttgcaaagcttgaacttcgcggcggatttcggggctaagacccgaaatgaaacaactcagcaaaatggagggagaaaggccgacgatgcggttggctaatctttcgaactccgtgaggtattccgtgactgatccgcgctgcattaacttgaataatgttccacgaggatcatcataaaatgatggggcaaaacgattctcaatagcttgaagaaggtcaaaccaggaagtgatgaaaccgttcctgtacatccactggaaccagctgagagctgttccatcgaggtagaaggaagcaaccgtgatgcgatcctcctccggcgttccttggtattcaaaaaattgagagattttaaaaatccatcccaacaggtcgtggccatcgaagcgtggaacttcgagcttgactggaggtcgaggatgactggagtgctggggtgaagggtgtgacgtggagtgtatctgggagagttgctcgtacaaggcgttgaccttgctggctaggtcggagtgcttctcagagaggatggaaatggcgtcctcgagcctgtcagtggtggtacggcgagttccgtgttcggccatggcggtagagcggtggcagcaggtcggaccaaagttgttagggacgctgtgagggagagagagaaggaagtatttttcttggattcgaggccaagtcctcctgacagactacactattcaggactaaagttctttttcgtaagttttatttacgctgagatacttcttttatacacgggtacgtttcgaccatgaacagctttcctaactaattcacgtgccaatataacagactaactaacttgctgttaatacaacacgtggtcttattatcacacgtgatctataacacgtaatcttctagatgcttcggacgtgtggaactcctttgtcttcgtggtactggttcatcgtggctgctatcttccttagctgggttgctgctgctaacatagaaatactaagttatgggcaagattttgatatactataaccttaatttttacaataaacctaaatgtctaaatatcataactcaaccatgcgacgaaatgacaatgtgttaattttgttgtgtcctcaaccatgcgtatgcctcaggccaagggaattctcacacacgattcctaacaatttctaaggaattccacaacgtgtctatgcttcagacaacaataacgtacgaaataaacaagtagcatctaataacgttaaaataagcacacacatatatcgagccaaccaactttggaggtagaagaacaacaataatatcaatatttaatttcatttagggttaatttattaggaactcaatgtaaaataataatttattagaaaacaaatacaaaatttgagtatttattaagaataaaaacatatttaatttcatttagtgtttaatagtgttttggtctatgtttttttgtctaatagtaggtgtggttgtgtaggtgtgtttttttgttgagaaaatctttatataattatgagctatgataaaatcaaaaatccatgatgagttccgtatttaaaaatcgttgtagaattatagggtggattaaaatgaaacgtatttgtcattgagtgcatattaaaatgaaacgtacatgcattacaataaataaaacatttaaactttaattttaatatagaatttttctaaattgttatggtgcatgattaaactttaatcatggagtacacattttgatagcattatgcagaacaaggccacagataccaataacagcagcactaacaggcccaagagagtgacccacagacccacatacctggaagacttcgtgtgaagatctgatgctattctagaagctacccttggatcaattctccgcgtgtttaatttccccacgtgttcctttggctgttagaattcgaaattctgttataacaaaccagagcaaaatatcttgtaagaaagctattataaaagcatgaatgaataaacggggtagcagagaagaatattttactgcaaatttagtttacttatcttctattcagttttcctgtaactttgtccactgagattcgtatcaaattggtccgacctgctcctcgacgccatgcccgaccaccatacccgccaaaccaccatcgacaagctcgaagaagctgtccaccgcctctccgagagccacacttccctctcccagggtcatcagtccctcaattccaagattgacaatatccactcttccctcacagcccaaattgaatccctcttcgaacgccttgccaccatagccctgcaacctaacccctccccttccccaaacaactcagcacacatacctctttcccctacctctcgccatcatcacctcaagctcgacgttccccgtttcgatggccacgacccgttgggctggatattcaaaatatcccagttcttcgattaccagggtatcctggagctcgaacgcctcaccatcgcttcattttatatggatggcccggccctctcttggtatcaatggatgcaccgtaatggcttcttctcttcgtggccggccatgttgcaggcactagagtcccgtttcgcgccgtcgttctacgacgacccctaaggtcacctgttcaagcttcaacaaacaggcaccgttaccgattaccttacagcttttgagcgcctcgccaaccgcaccatcggcatcgccccttcctcattgctcagctgtttcatctccggcttgcttctggagctccgccgcgaagtccaagcactacggcctatctccctcccacaggccatcgagcttgcccggcttcaggaggacaagatgctcgatcgtcgccgcggccctcggcctccgccgcattcccctttccctcactccccctcccctctcccttcctcagtcgcttccccttccctttccccaaaaacccctctttcccttccacccccgaaactccctgtcaagcgtctctccgccgaggagctcgccgtgcgccgcgaccaggggctctgctaccattgtgatgataaatgctcccctggccacagatgcaagtcccggctccatttgttcatcgcggacgaagacgtcctctcccctgattccccctctgacgacgaccctaacctcaccctagtctcccagatcagcctcaacgccatggaaggctctcccaccccacaaacctttcgcctctatggttccatcggccaccaccgcgtcattatccttgtggatggcgaaagttctcataacttcatccaaacacggattgcacgcttccttaacctccccactgcccccacctcccctctccgcgtcatggtcggcaacggccacaccctcgactgtgacactgtgtcccctcagatcaccctcaccattcagacccaccccttcacccttgacctacttcacctccccatttgcggcgccgatatcgtgctgggagtccagtggctcaaacatttgggcccagtcaccacagatttcgcagccctcaccatgacctttctttccttgggccgtcccattacgctaattgctgatgtaccccccaccccctcccctgcttcggcccatcaaattaagagactcgccaccacccacagcatctcagcccttttccacattacacctttaccggcccaaacacaccccctcccctccgtctcgccccccgactccatccctgagcccattgccaccttactccgccggtactccaccatcttctccgaacaacttatctcccacctccccgaaccatccaacaccacattcacctcttacccaatgaacccccagtcaacgtccgcccttatcgctacccacactaccaaaagactgaaatagaatctcagatcacggccatgctcgactctggactcattcaacctagccagagtcctttctcctcccccattctcctggtgaagaaaaaagatggctcatggcgctgttgtattgattatcgggcacttaataccattaccgttaaggacaaattccctatgccgacggtggacgaactcctcgacgatcttggaaaggcctcctggttctcgaagctcgacctccggtagggtttccatcagattcgcatggcaccttcagatattcccaagaccgcttttcgcacgcaccagggtcattacgagttccgcgtaatgcccttcggcttctgcaatgcgccctccaccttccaatccgccatgaacgacactctccggccgtttctccgaaaatttgttgcagtattttttgacgatatcctcgtctatagcagtgaccttcattcccatgtccctcatctggacgcggttctttcgaccctcaccacccatcaattctatctgaaggaatcgaaatgcatttttgcccaatcgaaactcaattacatgggccacatcatctcctccgacggcatcgcaccagaccccgataaaattcaagctatggtcaattggcccaccccgacatccaccactagcttacgagggttcctcggtctcacgggcttctatcggaagttcatcagaggctacgcctctatcgctgcccctctcaccaatctcctccgcaaagaccagttcgtttggtcgccggctgccacctctgccttcaaccaattaaagtcatacatgacttgcgcccctatcctaaccactcccgatttcaccattccctttatcatcgaaacggatgcatccgcatttgctatcggagcggtcttggtccaacaggatcatcccattgcgtactatagcaaggtcctctgccctcggttacagcgtgcttcagcatatgtccgggagcttcatgcaatcacctcggcggtccgcaagtggcgccactatcttctgggttcttcattcaccatccttactgaccataggagtcttaaggagctcatgtcacagacaatccagacgccggagcaacagacttacctggtgaagcttcttggttacgattacactatccgttacaaacctggggcccacaatgtcgtcgccgatgctctatctcgagtccctaccggcgaattcctctcccttaccgtgcctcactgcgactttctcaataccctccgccaagctttaatggctgacacccaatatcaggaattactccacgaaattcaaactacacctgccgcccatcatggtctctccattcgtaatggactcattcttaaagaccatcgcatctggatacctttccccacggccctcacatccacattgcttgaggaattccatacctctcccctcggaggacacaccggagttgcaaaaaccctccaccgcctccgacaaagttttgactggcccaccatcaagaaggatgttcagcgttttgtgtcccattgcacagtctaccaacaaaccaaatacgaaacgaagaagccctctggtttgctgcaacctttgcctatcccggcaaggatttgggaagatatgtcaattgatttcattaccggcctcccgccatcacagggccatactgtcattatggttgtagtcgaccggtattcaaaaggggctcactttggcgctcttcccacccatcacactgctcatcaggtcgccgtccacttcctcaccctcgtctgcaaacttcacggttttccgcgtagcttagtctcagacagggacgctttgttcctcagccaattctggaaggagctcttccgtctcagcggcacccagcttcgaatgatgacagcgtatcatcctcagtccgacggacaaaccgaggtcgtcaatcggactttggaacaatatctccgcgcctacgtccaccacaaacccagccactggtttcgatacttgcaccttgcggagtggtcttacaataccacggtacattccagcacgggttttaccccgtttgaaatcatttatggccggccccctccttccacggttgactatatccgcggttcctcccccattgatgctgttgactcactgttaacagaccgaacggagcttcacgcactcctccagcggcgcctccaaaaaacccaatcttctatgaaggccaccgccgacaagcaccgccgcgacactcaattctccatcggggattgggtttatctccgcctccgcccctatcgtcagaagtccttagcccaatcatacacgaagcttgctaagcgtttctatggcctgtaccaagtgactgatcgtatcggccccgtcgcttacaagcttgccctccctgccacctctaggatccacaatgtcttccacgtgtcattattgaaacttcatcagggcccctcaccaactaccgacgctccacttccccctctggccgttgatcaccatcccctcgtcagtcctttaaccatattggactggaaatgggacacttcggtcactcccccgctacgcttggtgctcgtccagtgggccggtttacctccggaagatacgtcctgggaatcttggtctgagttacagtcaacctacaacctcgaggacgaggttgtttttggaggcgtgggtgttgatagcattatgcagaacaaggccacagataccaataacagcagcactaacaagcccaagagagtgacccacagacccacatacctggaagacttcgtgtgaagatctgatactattctagaagctacccttggatcaattctccgcgtgtttaatttccccacgtgttcctttggctgttagaattcgaaattctgttataacaaaccagagcaaaatatcttgtaagaaagctattataaaagcatgaatgaataaacggggtagcagagaagaatattttactgcaaatttagtttacttatcttctattcagttttcctgtaactttgtccactgagattcgtatcacattttttccttatataagtaacatggttttacgtgatttgtttattatttatcttttcttctagttgtgttcattgttgtttgaaaattttctttaatatttttttgtttggacaatcacttagttacaccgtatgaaattcacggattggtttggaggcttgactatcaaatttcatctcgcatcagattaaacatcgcattactataccatatagttatatgtgattttttcccattcaattttatatttagctacacattaaaattaatttataccaaatttcttgcatataggtattttttagtgaatcaaattcttttttaattcaaattgggacattagttttcgtatccgttaagaataatttattcctaatttaaataattgtattaaattctaattataaaaaaatcccgtatttattatcataaaaatatttaacaatttaatcattaatttcgtagtataattgatactggacaactaatatttattgcacttaatttcatttgataataactgatatttcttcaatcgcgtatcatttgttgcaaaacgaacatccaatatcattggagaacaatgttgatgtaacgattaattcattgataatcacatgaatgtattaaatccaggatattaaatttacaaataattttttgtttttcaattatattttaacaataattaagaaataaatctaaatcattctacatttacatttgtttataggtatttgggatattggccggagatgctatatgggaatctaaattttgcttaacacaaatgtggtatgcaaggaaaaatcaaattgaaatatttttaaccaccacttcaattttttaaaagatttgtttcaaaataaggatatgaaggaacaaattgtttttagagaacatttcctccatgatgttttcctttcctttaggtgaaaaaaaatagacatttccaaaaataatgaaagtgcatttatataatgttgtttatatagagaagtctttgaaaatataagtcaagtactattactacaaactattctgtatcatatatctcttatatattttgatataaaatatttattaattttttttttaatttcttagtaacatgtgcatgaaagtcaaaccaaaccgaatctgaggatttatgtggcatttaacttttatcaatttttgccctcaaagatcacactctaatcaagtaaaatagagacaaatttaaaagacaatgactaaattaaatatggatttggctattgccatattaacctcggagaggtaaaagatcattaataagtaataactttaataatagtaatagaaacagtagacttgtaagcataaagttgttcctaggaaaacaataagccacaaagaaatccccaagaatgtattcattcctaatccacaaagaaaagcccgtatgcgcttactgtgttgtcaatcccagagggctttccatgaatgatcttctccaaggaattttctataacaaaccaaagaactaaatataacaagctctcaacattactgaaatattctcaaaggaaagatctcaaagggatggcaagcctagtttttttttttttatcatagaaacattatagtttctccctagcaagaataatttgtgatggattgaaatttcctatatgtatctatgaacctgtggcataaagtttgtttttaagcacacatgacatgacatgataatacctagctttggattaccatgtgacaaaaaattactttcctaactttagtttccccgaaaggtaaaattaaccaaatctgaaaagcgtttcgtgtaatattggctacgcatgactaattaacttctgaaacggtcagctacttcataaccttttgatgtcattctccccaacaaaaaacaacttgttacctagcaacagcttgcttgcttgctttctcacgcacttagtgaccctctatgcttgtgaaataaattgttataacctttattgtttttcatcaatattaccaaaatttccttaaaatgttcaatatttcgtaatcttcataattaattcaaaattctcaaaagattagtatatgaccttttttcttgtttgtactaggagaggaataaatgaaaaaaaaatcagaaatttgtggattgctatttgctcaaatgatgggtctccnnnnnnnnnnnnnnnnnnnnnnnnnnnnnnnnnnnnnnnnnnnnnnnnnnnnnnnnnnnnnnnnnnnnnnnnnnnnnnnnnnnnnnnnnnnnnnnnnnnnnnnnnnnnnnnnnnnnnnnnnnnnnnnnnnnnnnnnnnnnnnnnnnnnnnnnnnnnnnnnnnnnnnnnnnnnnnnnnnnnnnnnnnnnnnnnnnnnnnnnnnnnnnnnnnnnnnnnnnnnnnnnnnnnnnnnnnnnnnnnnnnnnnnnnnnnnnnnnnnnnnnnnnnnnnnnnnnnnnnnnnnnnnnnnnnnnnnnnnnnnnnnnnnnnnnnnnnnnnnnnnnnnnnnnnnnnnnnnnnnnnnnnnnnnnnnnnnnnnnnnnnnnnnnnnnnnnnnnnnnnnnnnnnnnnnnnnnnnnnnnnnnnnnnnnnnnnnnnnnnnnnnnnnnnnnnnnnnnnnnnnnnnnnnnnnnnnnnnnnnnnnnnnnnnnnnnnnnnnnnnnnnnnnnnnnnnnnnnnnnnnnnnnnnnnnnnnnnnnnnnnnnnnnnnnnnnnnnnnnnnnnnnnnnnnnnnnnnnnnnnnnnnnnnnnnnnnnnnnnnnnnnnnnnnnnnnnnnnnnnnnnnnnnnnnnnnnnnnnnnnnnnnnnnnnnnnnnnnnnnnnnnnnnnnnnnnnnnnnnnnnnnnnnnnnnnnnnnnnnnnnnnnnnnnnnnnnnnnnnnnnnnnnnnnnnnnnnnnnnnnnnnnnnnnnnnnnnnnnnnnnnnnnnnnnnnnnnnnnnnnnnnnnnnnnnnnnnnnnnnnnnnnnnnnnnnnnnnnnnnnnnnnnnnnnnnnnnnnnnnnnnnnnnnnnnnnnnnnnnnnnnnnnnnnnnnnnnnnnnnnnnnnnnnnnnnnnnnnnnnnnnnnnnnnnnnnnnnnnnnnnnnnnnnnnnnnnnnnnnnnnnnnnnnnnnnnnnnnnnnnnnnnnnnnnnnnnnnnnnnnnnnnnnnnnnnnnnnnnnnnnnnnnnnnnnnnnnnnnnnnnnnnnnnnnnnnnnnnnnnnnnnnnnnnnnnnnnnnnnnnnnnnnnnnnnnnnnnnnnnnnnnnnnnnnnnnnnnnnnnnnnnnnnnnnnnnnnnnnnnnnnnnnnnnnnnnnnnnnnnnnnnnnnnnnnnnnnnnnnnnnnnnnnnnnnnnnnnnnnnnnnnnnnnnnnnnnnnnnnnnnnnnnnnnnnnnnnnnnnnnnnnnnnnnnnnnnnnnnnnnnnnnnnnnnnnnnnnnnnnnnnnnnnnnnnnnnnnnnnnnnnnnnnnnnnnnnnnnnnnnnnnnnnnnnnnnnnnnnnnnnnnnnnnnnnnnnnnnnnnnnnnnnnnnnnnnnnnnnnnnnnnnnnnnnnnnnnnnnnnnnnnnnnnnnnnnnnnnnnnnnnnnnnnnnnnnnnnnnnnnnnnnnnnnnnnnnnnnnnnnnnnnnnnnnnnnnnnnnnnnnnnnnnnnnnnnnnnnnnnnnnnnnnnnnnnnnnnnnnnnnnnnnnnnnnnnnnnnnnnnnnnnnnnnnnnnnnnnnnnnnnnnnnnnnnnnnnnnnnnnnnnnnnnnnnnnnnnnnnnnnnnnnnnnnnnnnnnnnnnnnnnnnnnnnnnnnnnnnnnnnnnnnnnnnnnnnnnnnnnnnnnnnnnnnnnnnnnnnnnnnnnnnnnnnnnnnnnnnnnnnnnnnnnnnnnnnnnnnnnnnnnnnnnnnnnnnnnnnnnnnnnnnnnnnnnnnnnnnnnnnnnnnnnnnnnnnnnnnnnnnnnnnnnnnnnnnnnnnnnnnnnnnnnnnnnnnnnnnnnnnnnnnnnnnnnnnnnnnnnnnnnnnnnnnnnnnnnnnnnnnnnnnnnnnnnnnnnnnnnnnnnnnnnnnnnnnnnnnnnnnnnnnnnnnnnnnnnnnnnnnnnnnnnnnnnnnnnnnnnnnnnnnnnnnnnnnnnnnnnnnnnnnnnnnnnnnnnnnnnnnnnnnnnnnnnnnnnnnnnnnnnnnnnnnnnnnnnnnnnnnnnnnnnnnnnnnnnnnnnnnnnnnnnnnnnnnnnnnnnnnnnnnnnnnnnnnnnnnnnnnnnnnnnnnnnnnnnnnnnnnnnnnnnnnnnnnnnnnnnnnnnnnnnnnnnnnnnnnnnnnnnnnnnnnnnnnnnnnnnnnnnnnnnnnnnnnnnnnnnnnnnnnnnnnnnnnnnnnnnnnnnnnnnnnnnnnnnnnnnnnnnnnnnnnnnnnnnnnnnnnnnnnnnnnnnnnnnnnnnnnnnnnnnnnnnnnnnnnnnnnnnnnnnnnnnnnnnnnnnnnnnnnnnnnnnnnnnnnnnnnnnnnnnnnnnnnnnnnnnnnnnnnnnnnnnnnnnnnnnnnnnnnnnnnnnnnnnnnnnnnnnnnnnnnnnnnnnnnnnnnnnnnnnnnnnnnnnnnnnnnnnnnnnnnnnnnnnnnnnnnnnnnnnnnnnnactgttccgttggcaacatctgaactcaggtcaagatacaccaaatttgagagattcccaatctgaggaggaatcatcccatagaatccagtatgagagaggtcgaggtgagtcaaggaagtcattgtcccaaggaaagaaggaattgacataccttctccaagaaatccattgccgctcaagtccaagtaattcaaatgctttaaatcagccaaacaaggacttatcactccaccaaactgggatttctcataagcttcctcatcgaagtctgagtagagatagccatcatggtcatgatagaaagcagaatctgaagtgttgaggtgaagctgaagaagatgggaagtaaggttgtggcagaggactccataccagtggcaacagttggtatgattatgattccaagaccaaagcctattggaaggatctatgagattattcttaaacttcaaaagtgtctcacgctcacttgggatgcacacactctctctgcatggtaagctgaacaaccaaagctggacaaagacaagaatataaatggaggaggaattcatgatcatgcaacgcaaatatagaaaacaagtgtagttgttggttctgcatataaatcatcaaacttttattatttatactgctgccctgcctgtttttttaggtacagtttttttttttacaaaaataaataagaattattttattttaatttactctataatactgcttaaatgaaaatttggtgtcattaaacttcaaattttaactattatttaatcaatccttccgttaaaattttgttacgtacaaaagtccaacatttttttaagaaaaaaatcaagtcttttatttcatcaaatttaatattaaatcatcaaattttcaatattcaaactaaaaataatgtaaaagaaaattgtcttctaaatcatagcttacaccatcaagtcaatcttaaggttttccattttttcatcttgaacctttggacactccacaaagtccagccatgatgttaaggtatgacttcttcaacttgaaccataggtcactgcattaccttcatatcaagtttcctgtcattgacaataaatgttgtgagttaagtcaagcaaggaaaaaaaaatattattgatgaataaatcaattataggaaaagagtttactttgaagactattttggttaaaaaaaatctataaaaaaattatttcattccaagctagctatttaattttgatcaatttttcaattcacaaaataatattcttcttatatgtgaaaaagattaattaatcttcattgtcattaatgattgttgtgttgtctatttctaattgtttttttaatcataatattattttctttttattaaaaattaattagtgagatacaaagaagtttaacttgatctatcataatttttgagatcatagtttttccttttataagttttggtccaaatttctccatgtattgtagatcatatttaacttaaaaagtaaattagaagatctacaaagaagtgtggcatgttttttaaattataaaattatggtcctagctatctattgttagaccacaagttttcatatattaaagtttttgtataaatttcatttatggtgatagtttaagaatagtgatagaagacaaaaataaatattcaatttattgaaatatctaactcaattaattgatgaatacatcaattataggaaaagggtgtactttaaagactatttctattaaaaaatctataaaaaaaattatttccttctaatctaattatttaattttaatcaatttttcagttcacaaaataatattctcttatataggaaaaaaagactaaatttaattatcatcaattggaaaagttattgtgtcatgtatttataattgtattctaacttgaatattattttatttattatataaaaattaattagttatataaaagaagtaaaaagaatattaactttttttctcaaaaaaaaaaatcagtatcatattttatattttttacaagttatcaacttaaataagaggagaaacataattttaatttcttttttactttttaaataattgcaagtgccaaatttaaataatcatgagaatactcacgttcaatataatattttcaaaaaaaaaaatccatacgataacttaaacaatctataaagaaatataatttattcttgtgctaaatactaaaacaagaaacattttttattttagtttaccgtatagaattgcttaaatcaatgaaatttttattttaagaaaatattaatgatttttttaaactttaagtagtttacatcaagatataatttggctatggcttaattagtcttcaaattttaacttttattcaaatcaatccttttgttaaacctgtacgtgttaagtaaacaacaacaagccttgccttataaaattcaaacattctattacattcggtttgaacccataattaattttaaactatcaaattttaattattcaaaataaaagaaatgaaaacaaaattgtctcctagacaaaccgctggccactccactaaatctatatcaagttccccacttttccaacttgaaccatagactactccatcaagtctatgtcaagatcctccattttttcatcttgaaccttagcacactccacaaagtccacccatattaaggtatctgacttcttcaacttctgcaatgcatatatagaaaacaacttaattgtataagtgcttcttgcttctgcatataaatcataaaacttctattatttatactgctgcaagtgtctttcttttcttttttctttttttttatgatgtttcttttttttaattattgactttattatccaattctaccgagttaattcttagaataggaaataattttgaatttactttatctatctccctttttaaaattcttatatacacaaaattttgtattgaatttaactattatttaatcaatcctttcgttaaacttttgttaattaaacaataaaagtccaacattttatttaaaaaaattcaagtcttctattttatggactccatcaagtcttttattaaaagtccaacttttgttaattcaagtcttttacaaaattttgttaattcaacttttgttaattattacaaaatttggtattgaatttaactattacttaattcaagccttttattaaaagttcaacttttgttaatttaaatattattttgttaattaaaccatagccgactccatcgggtccatctcaaggtcctgtattttttcatcttgaacctttggacactccacaaagtccaatcatgttatggtctctggcttcaacttgaaccatagcccatagggcacaaacaatatattaatgataaatacatcaattataggaaaagggtctaatttaaagactatttcagttaaaaaatctatataaaaaaagattatttcattcatatcttgctatttaattttgatcaattttttaattcacaaaatgaatatgaaagaagactagatttaatcgtcattaattggaattgttgttgtgtgatctatttctaattgtattcaaatatcaatattattttctttaacatataaaaattaattggtgatataaaaagaagtgtgaaaaagaatattaatttttttctaaaaaaaattagtagcatattttgtataggaaaaaaaaatttctcatgattcaatataatattctcaaaaaaaaattcatatgataacttaaataatctactaagaaatatgatttattcttatgcagatcgaatactaaaataagaaaaaaaatattttagatcacagtatagaattgcttaaatcaatgaaattttattttaagaaaatattaatcatttttttaatactttgagaagtttaaatcaaaggtaattaaatttggtttaattagtcttcaaattttaactattatttaaatcaatcctttcgttacacccgtgttaagtaaataacaaaaagtcttgtattataaaattcaaatattttattacttacaatttgaacctataattaattttaaactgtcaaattttgttaattcaaaataaaagaaatgaaaacaaaattctctcctacacaagccgctggccataattaattttgaacccataattaagtaaagttaacatttcaatttgataattaatttaaaatttgaattttattattgtataaagttaaacttgaaaaagcaaaacgaataatacttaaaaagttacacctaatatttgccctttttatagttagagtaatttagaatattactccaacaattttgttggttctcaagcatcattggtctggccggcttgaagagtcaagtcttgtatgcagccacgagtcacgactttaatatgcaagaactcactattcatctacatgattaatgactaaaattgaatataagtttttttcctattaaaccatgttttcttgaaccactagtcccccatttttggaaacaagaatgtgatacacaccaaacttttttccatcatgagtcaagtctatgcaattaatctggatcgtttcactacaatttgacgaatcgtcatgctcttggatccactctcctactcttacccaacattgagactttagagaaaggaaaaaaatgtaacccaattattgctttctttaaatggtttgcctctcattaattgtgctaattgttagtcgtaattcacgattttggtgctatcattttgataaattaggcatggaaatcaacattcaccatttgacttgtatttaattgaaaatttcctttttaatttttttttcaaatcgtcttagaatgtgatttttttttcttttcattgcacttattatattacaagcattcagaacaattaatatttacaaacaatgttattaactcattggcaagtgcatcaagtatcgtttgcacgggaattttacttgtactcaaatagtgtgtattcaatttgtatgcaattaatgaacgaactggaaaaatgctaaataaattattttggttgtaaattaaacgatggtgcaattctatactagaattgagtaaaggaaacaaataccgaataatttttttttgctatttaatattattctagctgtctcttacacttgcagaattactctaaccgtgattcctcacacgagagagtttaattcctaatcctcaagaattaaactaagtgcattgcatgactaataaagatgtacacttcggctaaattactttacactatccctagtaatgaaacattttagatgctcttttaagttctaaggattaaccacattttccaatgcttaaaccctaacataacatataaatgaatgatcaaacaacatacatggaaataaacacagaaagaaacaatgaaactagtgataatattaaataaataataaaagtttttacatcaagagagtttggtgaaagctccccaacaatggaatatttagccctcatggtcatggagggctcaactatacaaaagtgtgtaagaggtgaaaggatagggaatgaaagtgaagtggaaaagaagaatgggttctcaatgattatcctccttctagctcaagttttaggggttttcttcttatcttcgtatgaacccctctcctctcttctcttttgcttaaaaaaccttattgagtttgaattcccgtgactacatgttgagcatgagtaagtggttgggcgataagcgagccatgcccttttgtctgactacaggttctctaaactgcttcttcgcgttggacgggcattctcctgctaagagacaaagctcgttgagcgagttttatgcacttagtgtgaaccatcagacttcaactccactctctatcctttgcatgtaaatttgcaaaataaaatcatcaaaacatatgaattaacattttaaggcacctaatgcgtaaaactcaaaggatgtcaaatttctaattattcacacaaaaagaagtaataaaaataggaggacattgctacttcttatatgttttaattacataatctacttctgcacaacaattatcaaatgtaaggccacctcaaatttcaatgagaagttcataccaaaatatatgaatcaaataaaatcaaatcaatatatcatgatgtcgtaaatgaattgggtaaccttttccaaaattgttgttggttccattgcatttgctaactcaagaagacaaaagaggcatattgcaaacaaacgactataactgaattcctcctttgttccagctctttctgtgatatcctttaatataccctcaacttgtccttctctaaatgaaaaatctactagtgaagttgaactttggaaccctttccaggcttataagtttgaattttactagatgttttgtggagaagattaaggttcagtttggtgcttatggtggtggtgtgacaccctctacctcacacatatatgtactaataataaaagaaataattaaaaaaaaattaaacttaattcaagtttttaaaacatatttaaaatacaagccttacaagagggtagcaggctcacattcatctttctaacatcatcataaaacttttctaaataaataataaattcactttggctcaaacaaggccgtctataaaaccctatactccaatgccacatcctatcagagcattgtgtcccgacgtccttcagcacatggttccttaaagcaattcatctagtcatctgctttcctgaacacaaagttcaagatcatcacaggatccaaacacaaacaacacatggggagtgagttatcacattcctaactaatagagaaacaagacaactagatatacatatcatataaaccaaataaaacttaattacacgtaattcacgtaattccaccactttgtcattcaaagttcacttttcaatcatcaatcacattacacaagaatcacacgctctgatcaagacataataacacatcaatttcataataaacaattagcaagcgcatgagacaattatgctaagactcaagcctatatgcaatgtagtaccatgtcagtgaaaaaccaccatggggcgcttaggagtacataacaagacacaccacacaatgggtttgtcaggtcactctcactaagtaagatcatagggagaccagtcagggtcacgatgttttgcgagaatgctccaaccatatgggattagcataggcttaaaggagcactcaaacccggtgacccccaaggcctacactccgaagagtccgtcagggaggtccaacccctaaaatcattttagcacacagacactgctcgtgaattatacaatacccatgacctcacactcgtgtgttaaacacgtacaacctattgcactacaatttaacattggttcctaaataggaaacctacattttctctttaacactgcgcatttacacatttctcaagataacactggtcgggttattttacaattcacagcttacaacacaaataatgtcacatcaagagttaatcacacacttatttacaaccaaaactcattcacaatttcacatctcataatgttacaatccaccattatatgttttcgcgtatttcacaattcaacacatgttctactttacacttttactcaatctcaataacaatattataatctcaaggcaacatattattccataattcatcacgtacttcatttataaacactgctcatgaattatacaataccacaacctcacactcatgtttcaaacatgtttaacacaattgtgctacaatttaacactagttcctaactaggaacctacactttctctttaacactgcgcataaacactggtcgggttattgtataattcatagctcacaatataattaatgtaacatcaagtgttaaacacatccacttattcacaatcgaatatcatgtccacactttaacatctcataacatcacatcaaccatctcataacattcttaatgatattcataaggtacaatacacacatgttcatcaaatttaaccataatattctcaaactccatcacttaataatttttggaatcatactataacactctacaatattatttacataaattattaatataaataactacctctatatatataagctagcatacatcatattgaatcacaaatatcaaagtaaactttcaatgcacaaattctaaataattatatgaacactttggtcaatttcaattatgatattaattttttaaattatatataaaaacctaaaaaaagaaagaaaaagagaacatacaaaatcaatatctctctctaaattttttcttactttatttcatcaattaatattaattagaaaaatattcgatttatagggttcacgctcaacacaataacatatcaatttcacaacaattggtttgtcaaacatatataattcactgtaataattataaggataaatgaaaattgcaaaaacaccccaaaactcattccaattgatatctctaaggatccctacacatgttctcactaatccccaattgtgaataactcatcccttacctctgagcggactcacgcgtcttcagccagcgatagcagcatctatagcagttccctgagattccttcagttattcctcccactgctccgatagagttctcaaacgtcagagagacggagaagagattgaaacctctacttatactgtcttcatgcgattcctttttctccctccacgaatattatctcgcaaatctcaacgttggcagtgtgcacaattgaatttcaaataacatatccaaatttcatgaaaatccaacggttaacgaaatcgggatcatagttttaccgagacagttttgggtttctgcgggatattaaaaggctacaatgcgaagggttttcctataagcttagacatggttttgaaattcgcaacggtgaaaattcttggaattgggttgtgaacctggtgtttaaatttcacgacgatccaacggtaaatgagtcggagatcgtcgtttttctgagacaagtttagtgagctacgggaaaaagaaagggttttgaaaagagaaagagaaaaacgaaaatgagaggcagaggctgaggagtcagtctgaaaacctagcatgttgttatttatagctaggggcatttacgacctattatttactttatttatttatttttattatttttactaaaaaaaattttaaatttatttataaaaaaaatgagatgttacaagtggcgtttcaaaagtaatttctgcaacttttaacacaagaaatggttcaacacattttaaatgttttcacaagtaattttttactgttaaaaacgattaaaaataaaatatgctataaattaactgtcaagctatcatttaataaaaaaaaacataacaacaaaaaccaaaaataaaaaaaaagtaatttagaaactaatataagttaaattttagttgaagtactaaaaataaaaataatagaaaattaaagaactaaatatatattttatgcatgtatatatattcataaatgcgttgaattggatggtaggagtaggaataggtcaggttggcctacacgggtctacgacctgacttacataaagcctgacctatttaattaaaaggttagactcagactttttttaaaagcttattaaattaaatagatcagacttaaacttgttaaaaagttttataagcatatatatatatatatatatatatatatatatatatatatatatatatatatatatatatatatatatatatatatatgatgattccataccggtggcaacagttggtatgattatgattccaagaccaaagcctatttgaaggatcattcagattattcttaaacttcataagtgtctcacgctcacttgggatgcatacactctctctacatggtaacctaaacaaccaaagctccacaaacacaacaatataaataatggacgaggaattcatgatcatgcaacgcatatatagaaaacaagtgtttttttcttagagctgaaacaagtgtacttgttggttctgcatataaatcataaaacttctattatttatactgctgccctgcctgttttttttcttcactttcattatttttttacctttttttattattgtggcaaatactaaaatattttttttaaaattttaatttacttcttagaacggtttaaattaatacttttttggaaaattttttgacgttgccttttttaaaattttaattcactttttctttttttatgcaggcttttttaaattatcgacttaattttaattcacttcttctttttcataacaaagaagaagtgaattaaaattaagtcgataatttaaaaaatcagtttatttacaaaaataaataagaatcattttattttaatttaccctataaaactgcttaaatgaaaatttggtgtcattaaacttcaaattttaactattatttaattaatcatttcattaaacttttgttaggtaaacaataaaagtccaacatttaaaaaaaaaatcaagtcttctattacatgatatcccaatccataattaatattaaattatcaaattttcaatattcaaactaaaaataatgtaaaaaaaattgtcttctaaaccaaggcttacatcatcaagtccatctcaaagtttttcattttttatcttaaacctttggacactccacaaagtccagccatgctatggtttgactttttcaactttaatcataggtcactgcattaccttcctatccatttgcttgtcattgataacaaatgttgcaagttaagtcaagcaaaaaaaaaaaaaaaaaaatatatatatatatatatatatatatatatatatatatatatatatatatataattgatgaataaatcaattatagaaaaatggtgtactttaaaaactatttttgttaaaaaaatctatataaaaaagattatttcattccatctagctatttaattttgattaatttttaattcacaaaataatattctcttatatttgaaaaaaagggctggatttaattatcatcaattgagaagattgttgtgtcatgtatttttaattgtattagaacttgagtattattttctttatcatataaaagttaattagttatataaaaaaactgtgaaaaagaatattaacttttttgttaatgtaggctattaattgcgtcctttttctaatttcatattcattatattttgttaatgcttgctgatttgttggattatattgccagtacacttatattatgtacgttgccattgtatcctgattgttgccatttatttcttttactcttttttttggttcttttattttgtccaactttaactttaactttaattagtgaggctcacgcggatttgtgctttttaaactttcttttcattttaccttactttctgtgtaacaaccaagaggaaacattcaacacgcaaagatgaattcaaaattcaacacggattcaaattatttaaagaccactgtgtagcagcaattgtttatgaagtttcaaattatttaaagaccactgtgcaagaagaaacattcaacaggcaaagatgaatacaaaatttcatttttaaagatcactctgtaaaagagacgacgtctaaggtggatcattgttggaaacaaatttggcagctgtttttttattatcttgtacaatccccagcgttttctctgaaaactaaaccttggccaattctgaacaaatgaattatgatcggtttggttttgtatattttttttcatctcaaactatttttttttatgagaactaaataagaattaaagaaataattaaacaaattcaaaatgtcacattttctagactcttcccactactcaaatctcacattaattaaatcattcatttctaaactcactactatcctaaagtagtaaagtccctctcatccttcataattccctttaaatctattgagtaaagatagagacagaataaagaataattcgaataaagacagtaatggccgatggcgtgccgttttgtgcattatatgatgtggtccacaatttgaaacatatataaattatattatatatgtctaatttatattatggaaaatcataataaaggtctaattatattattgaaaatactatttttacatttcacaagataaatgtcttatttattatgtctaatataaattatactagataaatgtctaatttatatttgaagttcaatgaataaatatttttgcatatataaaattatatcttggattttataacaaacaatttaaattgtgaaaataaattacccttcaccagcagcaaggtcgaagtagagatcaagaatgttggggcagcttttgtagcactgagggaagcaaaggttttgtgcgaaaccactttccataagagaattgatgagattccaaagtattttctgtccaaccaacaagccttgatgcatttctcactttcagtatgccccttaatttgtttttcagccgaagtcctgcacgtgtaagcttcttcccctgttctcttcacatgctaagaacatatttttaaagggaaattcttgttgttaagaatttgtacgtgcatgcaacacttttgaactccgtcaaagatttttttttttaaattaacatttccaccaataatatgcaaacacgtttgtcttgggttggtgcaaaaaattctcgtgctctatagaaatttgaaatatggatctacgtttaacttccttgaatgaaagaaatatgtaaagggtacgatgtaaaatttacccacggacttaacttaaatgtggttgtaattaattatttttttagagaaaaatgattatgtaaaaaaatttatacaattatttaagtacaatttattatatataatacattttttattaattattttaaaataattcagatcatgatttatgattaaatgattatataaaattattttatatggttagtatattgacattaaacttttatttttaaatgataaaacttaaatataatatttaagatattttgacagtgttctttagtcaaaattagaatttaatcttggtaatctttataataagtattttcattaaatattgtttacgctgaaatttggtaaacaatcgctagtctaatcgagttgtttgcgagatcgactagtgaatctcaggagcatgtcatttgtgtgtttgcatttaaatgtaaagctttgaatgttcatcattgcaacaaacctttactggttctgaggtttgcagaaagtaaaattctttgaaagaattgaaatgctggaagtaaattgacaagggaaaggtaaattgcagaatttaaaggaccaacgaattcattcgatcgaatgaaccatttaaaagacaggaattatataaaaatgaaacgtaaattgcattgcattcgaaattgtaaagtttacagaaacttaaaatggttcacaatcatacattctccttgcgtactcgtttctctctgcgctgggtactttgagtgtataaggatttgtagaaatgatttgcgacctcgaaatctgactaaaaactgctatatatagacattcgaaaataaactgccctaacggtcgaacactatcctaatgccaagtgtcctgctacgtacaccttacatgcacataactgctccttagaacggttatccacattgctcgaagtcgaactgattttgtgaagttttgtcagaaattgtgctaagtccagaaatcttgctgccttgacttcgactcgaccatacaccagctcgaatcgcccaatggttcgaagccctccttcttgtcttagccttatatttcgtaaacacttccttgaacctgtgaatccctttcaatagactcttctttcttttcgattcgaacagtatccaacaaaattcgtatttagagcatatttttagctcatcaaaaaaaatatgggctaacaaattgcccccaaaaaatgtctgcttcgattcgagatcgaaggaagatgagaagttgacattttttctcttcttctaacagtttccctggaacggcgacacgatggcacgtttactggtaaccgtcgcctcgatctcccactacccatcattaattccacctttctaggcagagtgggacacgtgtcacgctggggagtcaaaagggaaatctgatgtgattgatttttgaccattgattattattatattgtttttttctccttttaaaaacgaaaactccataaacagtgccataaactccagacaaaaacccttcagcttctctgcttaaaaaacctttcttcttctttgcttccgagacccttcttcttctaattcgtatccattatctccggcgaagctttcttattttcagataactattattcctttcttcatcaacctcaccgtatccctgaactttgccactgttctttgcgaatccaagttcttacttactgattccaacagctaccaaacccttcacgagaaaatcatccctttttagatttcttacaatgtcgcaaggacaagcagttccatttgctgggaaatggcaccattttacagtcaggactgatggagaaaaggtggttccagaaccacatggtgacgccgaacacacagaaacctgggaatcggaggtgatgatccctttcgcagtggaaagaacagtttacgctttcggtggacccctgccagaccaagcatcactttcgagtaaaatgaacaaggtatttccctgctacccaacttgcgaacctaggatttttgatagtgagccttacaactttaattgtttaagcaaaccccacaaactctttcgatccgccccgtcaatagcccatagggattacctaccttggcttgatcgagtcgaacaagcgtatgaggatttctggaagacatatggcatctttgatttgatacaattctctcgatctggtcctgaatatcgaccagaaatgctgatagcagctatgcactttttcgagtcttctaccaacacctttcaatttaaatgtggtatgatgacccccactctcttagatgtagccgccctcacaggccttaggcctagcggagaaacttatgaccccactaattctagtgacaatatcaagctagtatataaggagaatacattttccaaatatatagctgaacacaaaggacccgtcgaagaggaggtttctgatgaagagcacgtagccttcttaaccctgtggctatcccactatgtcttctgcacgaaatccttgcaagtagccaaaagatttattccaatggcattacaaattcatgaaggtcagaactttggatttggacgcctcttgttagcagtgctatacgaatcgcttggtgaggcatgcgatgatctgaagaaatcgaaggatgggtcttccttcttagtgtccgggcctatgtggcttctccaattgtggcttaatgccactttcgaacaagaaatgggattaataatcccacaagattatgctgaagaagttgcaaatcgctcgatcgaaggccagagagcacttcgattaacacccaagaccttagatcaaaacccacaaaagctgttcctaaagtacatgaggatttttctgagctttgacaagtttcttccccaacatgctccattcattagtcgagaggttggcccggcctggttcactgactattttcctgctgtcgatccggacaatgaagaaaaagtgaacgaaatatggtcattttacttgaatccacagatcctgtcttgtcgtacaggtgttcaatcgaactatttaggcctggttggataccagcctaatttggtttcaagacaatttggcctctcgcaaatccgtcctaaaagcttgttcgaagatcctcgagacgtcataagaggggccaatctttcggaaaagactttcaagaagtttttgaagatttctcttgatgaaaactataacctgcatccttttgagttcaaccattcccacttctgcaccatggggtttgttacctggtgggagaaatattattcgacccgttcagttggagacactactatcatgatctccagacttgagagtggttttacacaaccaacggtcgagaatatccgctcaaaccttcaagctcgaggtattaaattacttttgactttctaaattgatatgtatttttgccttttctaatatttttactttcaggcaaaacaatcatgacgaagaaaagtgctgaaacgtctcgagctgatgtgagacccaagaaacccactggggtgaagatccaagaagggaaacaagaagagaaggtaactcttctgaacttatcttttactcttaacgtcttgcctcatatttctttattttttcagagtcaaaagaaagatgatagcattgatactaccacgacttcaaaacgctcgaagcatgcggtcgtcgaattagacgaagagaaagatgcaagttttatttctaatgtcaatattatagctttctttcaagtctatattctgacaaatctttaccctcgtaatgcaggaagaagaggaaagacctcttataagaaaaagaaagttacctgcgacttcgaccaagtctgctgaacaaacagaggcaggcaattcccaggctcaaatgcctaagaagaaaaagaaagtgaagcaggtcgagcctgaaccttctgtggctgttgagggtggtgagccaatcaagaagaaaaagaaaaagaccaagccttcaacagaacaaggtgacaatcaacctgttgacgtccaaccaccttcgaccgatattgacggcactgaagtagaggctactccttctattgctgagatgggcaaccctgtcgatcaaccggactcaccacaagaacaacctgccgtcgaggtatcatcctcttaatgtgttttaaatcatagcttatacgaaactatttgttaacctttttccatgataattcgaatcaggtacaacaaaatgtttctgtagaagaaataccctcacatgctcgaacatctcccgctcctgagacggatgcagtgaatgttgaggaacagggtgaaggtcaaggcattggatccagcagtcctcatggatcgagtcagaaaagttcatccgaagaaaacttttccgatgaagaggccataaaagaggctgaagctggaggttcggacatttacccggcgtcttcaacatctaagctttccgctagcatagggatcgcagaagatacattcattcaaatgcaagacgaagaccctgctgcagcccttcgactcctgctaaacacaagtcaagccaacacctcaagtgaaaagattcctggtgcttcgtcctcatctgatgccgaaataaactcttcagtacgccaagattctctgctcttgaagttatccatggaatacgcacgggaagatgtgcttaaatccattgaagagaacccctctgctgcctttgggcacctgaactttttgaagaaattgcacaacccccttacctctgatgagattctaggcaaagttatccaaatcgaggccatcattgaccaatttgcaagtactgtgcagaaaaaacgcgaaaatggcgccagactggatgcccagaaacaggcacatatccttctgctcgagaaagcccgagctgctcaacatgaagtcgaacgtctcaccaaagaggcgaaagaaggatcttctgagatcaaagcctgtgatgataacatctcctcctgggaggcaactattacgaatttgttgtctcaggtcgatgatctaaggcagaaaattgtagcagagcaggccaaacgcaaagaactccaggagaaggccgctaactcgattcagaaactggttgctgaaaaagggagggaaggcctgaaggcctttagcgcatctcaagctgtagcagatgaggcaagggttatggagagtgctgaccaggtcttaactaaagagatgatcaccttgaaaaagctgtatgaagatttggtcatgacttagtagaacttatgatttctttatttcgaattctgtatttcgattctacttctcgatgtaatattgacacatgccctttcgtggcaatttactgttatcgccatttttatgtttcccgtatttctcttattctatgcttattttaacttcgagcagtgttggtttatattttttcaaatacttaccatttatgctcaaagtacgtttctgaggggttagctcctctaactcataagcaccattcgaatagatctgaattattttaaacggtccttcccaatttggggaccatttgcccaaggctcgatccttactatctatgggcaggataaccttccaaactaaatctccaacattaaaagtttttgacttcactttcttattataagctttagcaactctttctttttgtttagtcaaaacttctaatgctcttaatctctcctcatctaaatcaactaactcatctgacatcattttccaataatggtcgattggaatgtccatttgtttttgtaccctggctgattgcaaatgtatttcgaccggaagtacagcatcatgcccataagtcagtcgaaatggggtagtattagttgattccttaggagaatttctacatgcccatagaacttgatctaacgttttattccaatttcttggctttagggcaatgtgttttttgatcaagttaattacaatcttattggctgcttcgacctgaccatttgcttgcgcgtaatatggtgttgaggttaataatcgaaagccagttttttgggcaaattcttgcattttccgtccagtaaaaactgaaccttgatcagtggtaattgtttcaggaataccatacctataattaatatgattttgaatgaaactaattactgcttcctgatcaacatttggcaaagggactgcttcgatccattttgtaaagtaatcgataccaactataatataacgctggttcttagaagaagcgggcttgatttcaccaattaagtccaaagcccatcctctgaaaggccaaggtttgattatggagtgtaactcactagcaggtacatgctgtatccctgcatgcttttggcattcctgacagcctttagcaaattctatgcagtcttttaacatcgaaggccaatacaaaccttgtcgaaataaaagccatttcattttatggcctgcttgatgtgatccacaagccccactgtgaacatgggaaactgctaagtatgcttctgattcacttagacattttaacaacactccttctgcagtctttttaaacaaatcatttcccataaccacgtaatttaaagccctatatttgacctttcgagccacattgcctattggattttccaaatattcaacaatggactttctccaatcattatctaacatattgtcaatggccaaaatttgaatttttccctggagatcatccatgctttcatcttcattattttgtggtatacttgcccccacaagttttggcattggcaatttagtgcttaatggctctggtaataccagtttatcttttattttgatcaactgagttaatttttccttcgacattttataccctgaagctatttgggctaaatcatttgcttcttggttttcttgtcgagatatatgctcaatgttaatgtaatcaaaat

(The sequence listing continues in the following parts.)
